(19) United States
(12) Patent Application Publication
(10) Pub. No.: US 2023/0042436 A1
(43) Pub. Date: Feb. 9, 2023

(54) METHODS FOR THE TREATMENT OF TRINUCLEOTIDE REPEAT EXPANSION DISORDERS ASSOCIATED WITH MLH3 ACTIVITY

(71) Applicant: TRIPLET THERAPEUTICS, INC., Cambridge, MA (US)

(72) Inventors: Nessan Anthony BERMINGHAM, Cambridge, MA (US); Brian R. BETTENCOURT, Cambridge, MA (US); Peter Edward BIALEK, Cambridge, MA (US)

(21) Appl. No.: 17/299,277

(22) PCT Filed: Dec. 2, 2019
(86) PCT No.: PCT/US2019/064059

§ 371 Date: Jun. 2, 2021

Related U.S. Application Data
(60) Provisional application No. 62/774,777, filed on Dec. 3, 2018.
(60) Provisional application No. 62/877,104, filed on Jul. 22, 2019.

(51) Int. Cl. A61K 31/7125; A61P 25/28; C12N 15/113

(52) U.S. Cl. CPC A61K 31/7125; C12N 15/113; A61P 25/28

(57) ABSTRACT

The present disclosure features useful compositions and methods to treat repeat expansion disorders, e.g., in a subject in need thereof. In some aspects, the compositions and methods described herein are useful in the treatment of disorders associated with MLH3 activity.

### INCORPORATION BY REFERENCE OF SEQUENCE LISTING

[0001] The contents of the text file named “4398_006 PC03_SL_ST25.txt,” which was created on Nov. 25, 2019 and is 992,755 bytes in size, is hereby incorporated by reference in its entirety.

### BACKGROUND

[0002] Trinucleotide repeat expansion disorders are genetic disorders caused by trinucleotide repeat expansions. Trinucleotide repeat expansions are a type of genetic mutation where nucleotide repeats in certain genes or introns exceed the normal, stable threshold for that gene. The trinucleotide repeats can result in defective or toxic gene products, impair RNA transcription, and/or cause toxic effects by forming toxic mRNA transcripts.

[0003] Trinucleotide repeat expansion disorders are generally categorized by the type of repeat expansion. For example, Type 1 disorders such as Huntington's disease are caused by CAG repeats which result in a series of glutamine residues known as a polyglutamine tract, Type 2 disorders are caused by heterogeneous expansions that are generally small in magnitude, and Type 3 disorders such as fragile X syndrome are characterized by large repeat expansions that are generally located outside of the protein coding region of the genes. Trinucleotide repeat expansion disorders are characterized by a wide variety of symptoms such as progressive degeneration of nerve cells that is common in the Type 1 disorders.

[0004] Subjects with a trinucleotide repeat expansion disorder or those who are considered at risk for developing a trinucleotide repeat expansion disorder have a constitutive nucleotide expansion in a gene associated with disease (i.e., the trinucleotide repeat expansion is present in the gene during embryogenesis). Constitutive trinucleotide repeat expansions can undergo expansion after embryogenesis (i.e., somatic trinucleotide repeat expansion). Both constitutive trinucleotide repeat expansion and somatic trinucleotide repeat expansion can be associated with presence of disease, age at onset of disease, and/or rate of progression of disease.

### SUMMARY OF THE DISCLOSURE

[0005] The present invention features useful compositions and methods to treat trinucleotide repeat expansion disorders, e.g., in a subject in need thereof. In some aspects, the compositions and methods described herein are useful in the treatment of disorders associated with MLH3 activity.

[0006] Oligonucleotides

[0007] Some aspects of this disclosure are directed to a single-stranded oligonucleotide of 10-30 linked nucleosides in length, wherein the oligonucleotide comprises a region of at least 10 contiguous nucleobases having at least 80% complementarity to an MLH3 gene. In some aspects, the oligonucleotide comprises: (a) a DNA core sequence comprising linked deoxyribonucleosides; (b) a 5′ flanking sequence comprising linked nucleosides; and (c) a 3′ flanking sequence comprising linked nucleosides; wherein the DNA core comprises a region of at least 10 contiguous nucleobases having at least 80% complementarity to an MLH3 gene and is positioned between the 5′ flanking sequence and the 3′ flanking sequence; wherein the 5′ flanking sequence and the 3′ flanking sequence each comprises at least two linked nucleosides; and wherein at least one nucleoside of each flanking sequence comprises an alternative nucleoside.

[0008] In some aspects, the disclosure is directed to a single-stranded oligonucleotide of 10-30 linked nucleosides in length for inhibiting expression of a human MLH3 gene in a cell, wherein the oligonucleotide comprises a region of at least 10 contiguous nucleobases having at least 80% complementarity to an MLH3 gene. In some aspects, the oligonucleotide comprises: (a) a DNA core comprising linked deoxyribonucleosides; (b) a 5′ flanking sequence comprising linked nucleosides; and (c) a 3′ flanking sequence comprising linked nucleosides; wherein the DNA core comprises a region of at least 10 contiguous nucleobases having at least 80% complementarity to an MLH3 gene and is positioned between the 5′ flanking sequence and the 3′ flanking sequence; wherein the 5′ flanking sequence and the 3′ flanking sequence each comprises at least two linked nucleosides; and wherein at least one nucleoside of each flanking sequence comprises an alternative nucleoside.

[0009] In some aspects, the region of at least 10 nucleobases has at least 90% complementary to an MLH3 gene. In some aspects, the region of at least 10 nucleobases has at least 95% complementary to an MLH3 gene.

[0010] In some aspects, the region of at least 10 nucleobases is complementary to an MLH3 gene corresponding to a sequence of reference mRNA NM_001040108.1 at one or more of positions 221-293, 321-506, 534-576, 584-636, 681-740, 818-878, 952-1024, 1129-1158, 1177-1264, 1287-1318, 1351-1378, 1536-1598, 1623-1660, 1739-1764, 1782-1823, 1847-1908, 2026-2051, 2063-2094, 2115-2146, 2256-2290, 2387-2414, 2421-2592, 2727-2788, 2826-2937, 3005-3043, 3078-3107, 3159-3185, 3214-3239, 3244-3272, 3282-3308, 3426-3483, 3561-3587, 3642-3769, 3804-3839, 3950-3977, 4004-4040, 4052-4115, 4139-4199, 4241-4301, 4328-4365, 4420-4448, 4472-4536, 4669-4708, or 4784-4810 of the MLH3 gene. In some aspects, the region of at least 10 nucleobases is complementary to an MLH3 gene corresponding to a sequence of reference mRNA NM_001040108.1 at one or more of positions 221-293, 321-506, 534-576, 584-636, 681-740, 818-878, 952-1024, 1129-1158, 1177-1264, 1287-1318, 1351-1378, 1568-1598, 1623-1660, 1782-1823, 1870-1904, 2063-2094, 2115-2146, 2256-2287, 2387-2414, 2422-2592, 2727-2788, 2826-2937, 3009-3043, 3078-3107, 3159-3185, 3214-3272, 3282-3307, 3426-3483, 3561-3587, 3642-3767, 3804-3839, 3950-3977, 4004-4039, 4052-4115, 4139-4199, 4241-4301, 4329-4365, 4420-4448, 4472-4536, 4680-4708, or 4784-4810 of the MLH3 gene. In some aspects, the region of at least 10 nucleobases is complementary to an MLH3 gene corresponding to a sequence of reference mRNA NM_001040108.1 at one or more of positions 221-293, 321-506, 534-635, 681-740, 842-875, 953-1024, 1129-1158, 1179-1264, 1287-1316, 1351-1378, 1568-1598, 1623-1659, 1782-1823, 1870-1904, 2064-2091, 2115-2146, 2256-2287, 2387-2414, 2422-2592, 2727-2788, 2829-2937, 3010-3043, 3079-3107, 3159-3185, 3246-3271, 3282-3307, 3426-3474, 3561-3587, 3642-3707, 3804-3839, 3950-3977, 4004-4039, 4052-4114, 4139-4164, 4174-4199, 4241-4288, 4329-4365, 4421-4448, 4472-4536, 4680-4708, or 4784-4810 of the MLH3 gene. In some aspects, the region of at least 10 nucleobases is complementary to an MLH3 gene corresponding to a sequence of reference mRNA NM_001040108.1 at one or more of positions 331-362, 393-438, 479-505, 534-574, 587-612, 681-740, 847-873, 991-1024, 1210-1262, 1351-1378, 1571-1597, 1623-1648, 1874-1902, 2066-2091, 2256-2281, 2388-2414, 2470-2515, 2732-2788, 2853-2878, 2901-2927, 3282-3307, 3562-3587, 4056-4083, 4241-4266, or 4506-4531 of the MLH3 gene. In some aspects, the region of at least 10 nucleobases is complementary to an MLH3 gene corresponding to a sequence of reference mRNA NM_001040108.1 at one or more of positions 335-449, 587-612, 682-736, 848-873, 991-1016, 1179-1204, 1233-1260, 1351-1378, 1626-1651, 1874-1903, 2066-2091, 2115-2146, 2256-2287, 2389-2414, 2471-2499, 2762-2787, 2853-2878, 2911-2936, 3562-3587, 3814-3839, 4006-4031, 4056-4083, or 4244-4269 of the MLH3 gene. In some aspects, the region of at least 10 nucleobases is complementary to an MLH3 gene corresponding to a sequence of reference mRNA NM_001040108.1 at one or more of positions 355-393, 952-984, 1177-1205, 2026-2052, 2066-2094, 2470-2498, 3159-3185, 3458-3485, or 4259-4292 of the MLH3 gene.

[0011] In some aspects, the oligonucleotide comprises the nucleobase sequence of any one of SEQ ID NOs: 6-4710. In some aspects, the oligonucleotide comprises the nucleobase sequence of any one of SEQ ID NOs: 89, 92, 102, 107-108, 110-111, 115-116, 150, 154, 160-161, 163-164, 166, 168, 175-176, 178, 180, 182-183, 185-189, 201, 211-212, 229-231, 234-238, 241, 248-250, 254, 265-269, 282-283, 285-288, 294, 296, 319-322, 328-329, 366-368, 377-379, 381-399, 487-488, 511, 514-517, 520, 566-568, 573, 591, 593-594, 599, 602, 666, 669-670, 701-704, 728, 749-753, 755, 757, 784, 786-788, 790, 828-830, 959, 972, 974-977, 1002, 1004-1005, 1007, 1009-1013, 1086, 1110-1111, 1126, 1149, 1172, 1176-1181, 1185, 1260, 1271-1274, 1276-1277, 1297, 1302, 1387-1390, 1392-1393, 1396, 1461-1463, 1473-1474, 1482, 1490-1491, 1495, 1498-1502, 1505, 1508, 1510-1514, 1516-1518, 1525-1526, 1529-1530, 1546-1547, 1572, 1596-1597, 1721-1722, 1724-1727, 1744-1746, 1797, 1800-1802, 1824-1826, 1832, 1835-1836, 1859, 1865-1866, 1870-1873, 1875, 1878, 1880-1882, 1911, 1914-1918, 1924, 1945-1946, 1949, 2000-2001, 2035, 2064, 2066-2067, 2090-2091, 2163, 2166, 2169-2172, 2178, 2181, 2184, 2186, 2194, 2255-2256, 2307, 2321, 2333, 2343, 2345-2346, 2353-2355, 2394-2395, 2403-2404, 2460-2462, 2489-2492, 2495, 2499-2500, 2524-2530, 2561-2562, 2591, 2595, 2616, 2644-2651, 2653-2654, 2661-2664, 2674, 2683-2685, 2687, 2690-2691, 2693-2695, 2725-2728, 2777-2782, 2784-2785, 2789, 2791-2792, 2794-2795, 2797, 2848-2852, or 2917-2918. In some aspects, the oligonucleotide comprises the nucleobase sequence of any one of SEQ ID NOs: 89, 92, 102, 107-108, 111, 116, 150, 154, 160-161, 163-164, 166, 168, 175-176, 178, 180, 182-183, 185-189, 201, 211-212, 229-231, 234-236, 238, 241, 248-250, 254, 265-269, 282-283, 285-288, 294, 296, 319-320, 322, 328-329, 366-368, 377, 379, 381-399, 487-488, 511, 514-517, 520, 566-568, 573, 591, 593-594, 599, 602, 666, 669-670, 701-704, 728, 750-753, 755, 757, 784, 786-788, 790, 828-830, 972, 974-977, 1002, 1004-1005, 1009-1013, 1110-1111, 1126, 1172, 1176-1181, 1271-1274, 1276-1277, 1297, 1302, 1387, 1390, 1392-1393, 1461-1463, 1474, 1482, 1490-1491, 1498-1502, 1505, 1508, 1510-1512, 1514, 1516-1518, 1525-1526, 1529-1530, 1546-1547, 1572, 1597, 1721-1722, 1724-1727, 1744-1746, 1797, 1800-1801, 1824-1826, 1832, 1835-1836, 1859, 1866, 1870-1873, 1878, 1880-1882, 1915-1917, 1924, 1945-1946, 1949, 2000-2001, 2035, 2064, 2066-2067, 2090, 2163, 2166, 2169-2172, 2178, 2181, 2184, 2186, 2194, 2255-2256, 2307, 2321, 2333, 2343, 2345, 2353, 2394-2395, 2403-2404, 2460-2462, 2489, 2491-2492, 2495, 2499, 2524-2525, 2527-2530, 2561-2562, 2591, 2595, 2616, 2644-2651, 2653-2654, 2661-2664, 2674, 2684, 2693-2695, 2725-2728, 2777-2782, 2784-2785, 2789, 2791-2792, 2794-2795, 2797, 2849-2852, or 2917-2918. In some aspects, the oligonucleotide comprises the nucleobase sequence of any one of SEQ ID NOs: 89, 102, 111, 116, 150, 154, 160-161, 163-164, 166, 168, 175-176, 178, 180, 183, 185-189, 201, 211-212, 229-231, 235-236, 238, 241, 250, 254, 265-269, 282-283, 286-288, 294, 296, 319, 322, 328, 366-368, 377, 379, 381-399, 511, 514-517, 567-568, 591, 593-594, 599, 602, 666, 669-670, 703, 728, 750-753, 755, 757, 784, 786-788, 828-830, 972, 974-977, 1002, 1004-1005, 1009, 1011-1012, 1110-1111, 1126, 1172, 1176-1181, 1272-1274, 1297, 1302, 1387, 1392-1393, 1461-1463, 1474, 1482, 1498-1500, 1502, 1505, 1508, 1510-1511, 1514, 1516-1518, 1525-1526, 1529-1530, 1546-1547, 1572, 1597, 1721-1722, 1725-1727, 1745-1746, 1800-1801, 1824, 1832, 1835-1836, 1859, 1866, 1870-1872, 1878, 1880-1882, 1916, 1924, 1946, 1949, 2000-2001, 2066, 2090, 2163, 2169-2171, 2178, 2181, 2186, 2255-2256, 2307, 2321, 2333, 2394, 2403-2404, 2460-2462, 2489, 2491-2492, 2495, 2499, 2524-2525, 2527-2530, 2561, 2591, 2616, 2644, 2646, 2649-2651, 2653-2654, 2661-2664, 2684, 2693-2695, 2726-2728, 2777-2780, 2782, 2784-2785, 2791-2792, 2794-2795, 2797, 2849-2850, 2852, or 2917-2918. In some aspects, the oligonucleotide comprises the nucleobase sequence of any one of SEQ ID NOs: 160-161, 163-164, 166, 211-212, 230-231, 267-268, 282, 294, 322, 366-367, 391-394, 399, 514-515, 594, 602, 728, 750, 752-753, 755, 828, 830, 975-976, 1002, 1176-1179, 1274, 1387, 1462-1463, 1510, 1514, 1529-1530, 1726-1727, 1745-1746, 1824, 1871-1872, 2090, 2256, 2528-2530, 2644, or 2792. In some aspects, the oligonucleotide comprises the nucleobase sequence of any one of SEQ ID NOs: 164, 186-187, 212, 235, 322, 367-368, 379, 384-385, 388-389, 391-392, 395, 515, 594, 703, 751-753, 828-830, 1005, 1176-1180, 1274, 1297, 1302, 1387, 1393, 1463, 1511, 1514, 1745, 1824, 1881, 2256, 2404, 2491, 2528, 2530, or 2646. In some aspects, the oligonucleotide comprises the nucleobase sequence of any one of SEQ ID NOs: 174-176, 178, 180-187, 566-569, 573, 701-704, 1260-1261, 1274-1277, 1510-1513, 2000-2001, 2194, 2196, 2661-2664, or 2666.

[0012] In some aspects, the nucleobase sequence of the oligonucleotide consists of any one of SEQ ID NOs: 6-4710. In some aspects, the oligonucleotide consists of the nucleobase sequence of any one of SEQ ID NOs: 89, 92, 102, 107-108, 110-111, 115-116, 150, 154, 160-161, 163-164, 166, 168, 175-176, 178, 180, 182-183, 185-189, 201, 211-212, 229-231, 234-238, 241, 248-250, 254, 265-269, 282-283, 285-288, 294, 296, 319-322, 328-329, 366-367-368, 377-379, 381-399, 487-488, 511, 514-517, 520, 566-568, 573, 591, 593-594, 599, 602, 666, 669-670, 701-704, 728, 749-753, 755, 757, 784, 786-788, 790, 828-830, 959, 972, 974-977, 1002, 1004-1005, 1007, 1009-1013, 1086, 1110-1111, 1126, 1149, 1172, 1176-1181, 1185, 1260, 1271-1274, 1276-1277, 1297, 1302, 1387-1390, 1392-1393, 1396, 1461-1463, 1473-1474, 1482, 1490-1491, 1495, 1498-1502, 1505, 1508, 1510-1514, 1516-1518, 1525-1526, 1529-1530, 1546-1547, 1572, 1596-1597, 1721-1722, 1724-1725-1726-1727, 1744-1746, 1797, 1800-1802, 1824-1826, 1832, 1835-1836, 1859, 1865-1866, 1870-1873, 1875, 1878, 1880-1882, 1911, 1914-1918, 1924, 1945-1946, 1949, 2000-2001, 2035, 2064, 2066-2067, 2090-2091, 2163, 2166, 2169-2172, 2178, 2181, 2184, 2186, 2194, 2255-2256, 2307, 2321, 2333, 2343, 2345-2346, 2353-2355, 2394-2395, 2403-2404, 2460-2462, 2489-2492, 2495, 2499-2500, 2524-2530, 2561-2562, 2591, 2595, 2616, 2644-2651, 2653-2654, 2661-2664, 2674, 2683-2685, 2687, 2690-2691, 2693-2695, 2725-2728, 2777-2782, 2784-2785, 2789, 2791-2792, 2794-2795, 2797, 2848-2852, or 2917-2918. In some aspects, the oligonucleotide consists of the nucleobase sequence of any one of SEQ ID NOs: 89, 92, 102, 107-108, 111, 116, 150, 154, 160-161, 163-164, 166, 168, 175-176, 178, 180, 182-183, 185-189, 201, 211-212, 229-231, 234-236, 238, 241, 248-250, 254, 265-269, 282-283, 285-288, 294, 296, 319-320, 322, 328-329, 366-368, 377, 379, 381-399, 487-488, 511, 514-517, 520, 566-568, 573, 591, 593-594, 599, 602, 666, 669-670, 701-704, 728, 750-753, 755, 757, 784, 786-788, 790, 828-830, 972, 974-977, 1002, 1004-1005, 1009-1013, 1110-1111, 1126, 1172, 1176-1181, 1271-1274, 1276-1277, 1297, 1302, 1387, 1390, 1392-1393, 1461-1462-1463, 1474, 1482, 1490-1491, 1498-1502, 1505, 1508, 1510-1512, 1514, 1516-1518, 1525-1526, 1529-1530, 1546-1547, 1572, 1597, 1721-1722, 1724-1727, 1744-1746, 1797, 1800-1801, 1824-1826, 1832, 1835-1836, 1859, 1866, 1870-1873, 1878, 1880-1882, 1915-1917, 1924, 1945-1946, 1949, 2000-2001, 2035, 2064, 2066-2067, 2090, 2163, 2166, 2169-2172, 2178, 2181, 2184, 2186, 2194, 2255-2256, 2307, 2321, 2333, 2343, 2345, 2353, 2394-2395, 2403-2404, 2460-2462, 2489, 2491-2492, 2495, 2499, 2524-2525, 2527-2530, 2561-2562, 2591, 2595, 2616, 2644-2651, 2653-2654, 2661-2664, 2674, 2684, 2693-2695, 2725-2728, 2777-2782, 2784-2785, 2789, 2791-2792, 2794-2795, 2797, 2849-2852, or 2917-2918. In some aspects, the oligonucleotide consists of the nucleobase sequence of any one of SEQ ID NOs: 89, 102, 111, 116, 150, 154, 160-161, 163-164, 166, 168, 175-176, 178, 180, 183, 185-189, 201, 211-212, 229-231, 235-236, 238, 241, 250, 254, 265-269, 282-283, 286-288, 294, 296, 319, 322, 328, 366-368, 377, 379, 381-399, 511, 514-517, 567-568, 591, 593-594, 599, 602, 666, 669-670, 703, 728, 750-753, 755, 757, 784, 786-788, 828-830, 972, 974-977, 1002, 1004-1005, 1009, 1011-1012, 1110-1111, 1126, 1172, 1176-1181, 1272-1274, 1297, 1302, 1387, 1392-1393, 1461-1463, 1474, 1482, 1498-1500, 1502, 1505, 1508, 1510-1511, 1514, 1516-1518, 1525-1526, 1529-1530, 1546-1547, 1572, 1597, 1721-1722, 1725-1727, 1745-1746, 1800-1801, 1824, 1832, 1835-1836, 1859, 1866, 1870-1872, 1878, 1880-1882, 1916, 1924, 1946, 1949, 2000-2001, 2066, 2090, 2163, 2169-2171, 2178, 2181, 2186, 2255-2256, 2307, 2321, 2333, 2394, 2403-2404, 2460-2462, 2489, 2491-2492, 2495, 2499, 2524-2525, 2527-2530, 2561, 2591, 2616, 2644, 2646, 2649-2651, 2653-2654, 2661-2664, 2684, 2693-2695, 2726-2728, 2777-2780, 2782, 2784-2785, 2791-2792, 2794-2795, 2797, 2849-2850, 2852, or 2917-2918. In some aspects, the oligonucleotide consists of the nucleobase sequence of any one of SEQ ID NOs: 160-161, 163-164, 166, 211-212, 230-231, 267-268, 282, 294, 322, 366-367, 391-394, 399, 514-515, 594, 602, 728, 750, 752-753, 755, 828, 830, 975-976, 1002, 1176-1179, 1274, 1387, 1462-1463, 1510, 1514, 1529-1530, 1726-1727, 1745-1746, 1824, 1871-1872, 2090, 2256, 2528-2530, 2644, or 2792. In some aspects, the oligonucleotide consists of the nucleobase sequence of any one of SEQ ID NOs: 164, 186-187, 212, 235, 322, 367-368, 379, 384-385, 388-389, 391-392, 395, 515, 594, 703, 751-753, 828-830, 1005, 1176-1180, 1274, 1297, 1302, 1387, 1393, 1463, 1511, 1514, 1745, 1824, 1881, 2256, 2404, 2491, 2528, 2530, or 2646. In some aspects, the oligonucleotide consists of the nucleobase sequence of any one of SEQ ID NOs: 174-176, 178, 180-187, 566-569, 573, 701-704, 1260-1261, 1274-1277, 1510-1513, 2000-2001, 2194, 2196, 2661-2664, or 2666.

[0013] In some aspects, the oligonucleotide exhibits at least 50% mRNA inhibition at 20 nM oligonucleotide concentration when determined using a cell assay when compared with a control cell. In some aspects, the oligonucleotide exhibits at least 60% mRNA inhibition at a 20 nM oligonucleotide concentration when determined using a cell assay when compared with a control cell. In some aspects, the oligonucleotide exhibits at least 70% mRNA inhibition at a 20 nM oligonucleotide concentration when determined using a cell assay when compared with a control cell. In some aspects, the oligonucleotide exhibits at least 85% mRNA inhibition at a 20 nM oligonucleotide concentration when determined using a cell assay when compared with a control cell. In some aspects, the oligonucleotide exhibits at least 50% mRNA inhibition at a 2 nM oligonucleotide concentration when determined using a cell assay when compared with a control cell. In some aspects, the oligonucleotide exhibits at least 60% mRNA inhibition at a 2 nM oligonucleotide concentration when determined using a cell assay when compared with a control cell. In some aspects, the oligonucleotide exhibits at least 70% mRNA inhibition at a 2 nM oligonucleotide concentration when determined using a cell assay when compared with a control cell. In some aspects, the oligonucleotide exhibits at least 85% mRNA inhibition at a 2 nM oligonucleotide concentration when determined using a cell assay when compared with a control cell. The cell assay can comprise transfecting a mammalian cell, such as HEK293, NIH3T3, or HeLa, with oligonucleotides using Lipofectamine 2000 (Invitrogen) and measuring mRNA levels compared to a mammalian cell transfected with a mock oligonucleotide.

[0014] In some aspects, the oligonucleotide comprises at least one alternative internucleoside linkage. In some aspects, the at least one alternative internucleoside linkage is a phosphorothioate internucleoside linkage. In some aspects, the at least one alternative internucleoside linkage is a 2′-alkoxy internucleoside linkage. In some aspects, the at least one alternative internucleoside linkage is an alkyl phosphate internucleoside linkage.

[0015] In some aspects, the oligonucleotide comprises at least one alternative nucleobase. In some aspects, the alternative nucleobase is 5′-methylcytosine, pseudouridine, or 5-methoxyuridine.

[0016] In some aspects, the oligonucleotide comprises at least one alternative sugar moiety. In some aspects, the alternative sugar moiety is 2′-OMe or a bicyclic nucleic acid.

[0017] In some aspects, the oligonucleotide further comprises a ligand conjugated to the 5′ end or the 3′ end of the oligonucleotide through a monovalent or branched bivalent or trivalent linker.

[0018] In some aspects, the oligonucleotide comprises a region complementary to at least 17 contiguous nucleotides of a MLH3 gene. In some aspects, the oligonucleotide comprises a region complementary to at least 19 contiguous nucleotides of a MLH3 gene. In some aspects, the oligonucleotide comprises a region complementary to 19 to 23 contiguous nucleotides of a MLH3 gene. In some aspects, the oligonucleotide comprises a region complementary to 19 contiguous nucleotides of a MLH3 gene. In some aspects, the oligonucleotide comprises a region complementary to 20 contiguous nucleotides of a MLH3 gene. In some aspects, the oligonucleotide is from about 15 to 25 nucleosides in length. In some aspects, the oligonucleotide is 20 nucleosides in length.

[0019] Pharmaceutical Compositions and Methods of Treatment Using the Same

[0020] In some aspects, the application is directed to a pharmaceutical composition comprising one or more of the oligonucleotides described herein and a pharmaceutically acceptable carrier or excipient.

[0021] In some aspects, the application is directed to a composition comprising one or more of the oligonucleotides described herein and a lipid nanoparticle, a polyplex nanoparticle, a lipoplex nanoparticle, or a liposome.

[0022] In some aspects, the application is directed to a method of inhibiting transcription of MLH3 in a cell, the method comprising contacting the cell with one or more of the oligonucleotides described herein, a pharmaceutical composition of one or more of the oligonucleotides described herein, or the composition of one or more oligonucleotides described herein and a lipid nanoparticle, a polyplex nanoparticle, a lipoplex nanoparticle, or a liposome; for a time sufficient to obtain degradation of an mRNA transcript of a MLH3 gene, inhibiting expression of the MLH3 gene in the cell.

[0023] In some aspects, the application is directed to a method of treating, preventing, or delaying the progression a trinucleotide repeat expansion disorder in a subject in need thereof, the method comprising contacting the cell with one or more of the oligonucleotides described herein, a pharmaceutical composition of one or more of the oligonucleotides described herein, or the composition of one or more oligonucleotides described herein and a lipid nanoparticle, a polyplex nanoparticle, a lipoplex nanoparticle, or a liposome; for a time sufficient to obtain degradation of an mRNA transcript of a MLH3 gene, inhibiting expression of the MLH3 gene in the cell.

[0024] In some aspects, the application is directed to a method of reducing the level and/or activity of MLH3 in a cell of a subject identified as having a trinucleotide repeat expansion disorder, the method comprising contacting the cell with one or more of the oligonucleotides described herein, a pharmaceutical composition of one or more of the oligonucleotides described herein, or the composition of one or more oligonucleotides described herein and a lipid nanoparticle, a polyplex nanoparticle, a lipoplex nanoparticle, or a liposome, for a time sufficient to obtain degradation of an mRNA transcript of a MLH3 gene, inhibiting expression of the MLH3 gene in the cell.

[0025] In some aspects, the application is directed to a method for inhibiting expression of an MLH3 gene in a cell comprising contacting the cell with one or more of the oligonucleotides described herein, a pharmaceutical composition of one or more of the oligonucleotides described herein, or the composition of one or more oligonucleotides described herein and a lipid nanoparticle, a polyplex nanoparticle, a lipoplex nanoparticle, or a liposome; for a time sufficient to obtain degradation of an mRNA transcript of a MLH3 gene, inhibiting expression of the MLH3 gene in the cell, and maintaining the cell for a time sufficient to obtain degradation of a mRNA transcript of an MLH3 gene, thereby inhibiting expression of the MLH3 gene in the cell.

[0026] In some aspects, the application is directed to a method of decreasing trinucleotide repeat expansion in a cell, the method comprising contacting the cell with one or more of the oligonucleotides described herein, a pharmaceutical composition of one or more of the oligonucleotides described herein, or the composition of one or more oligonucleotides described herein and a lipid nanoparticle, a polyplex nanoparticle, a lipoplex nanoparticle, or a liposome; for a time sufficient to obtain degradation of an mRNA transcript of a MLH3 gene, inhibiting expression of the MLH3 gene in the cell.

[0027] In some aspects, the cell is in a subject. In some aspects, the subject is a human. In some aspects, the cell is a cell of the central nervous system or a muscle cell.

[0028] In some aspects, the subject is identified as having a trinucleotide repeat expansion disorder. In some aspects, the trinucleotide repeat expansion disorder is a polyglutamine disease. In some aspects, the polyglutamine disease is selected from the group consisting of dentatorubropallidoluysian atrophy, Huntington's disease, spinal and bulbar muscular atrophy, spinocerebellar ataxia type 1, spinocerebellar ataxia type 2, spinocerebellar ataxia type 3, spinocerebellar ataxia type 6, spinocerebellar ataxia type 7, spinocerebellar ataxia type 17, and Huntington's disease-like 2. In some aspects, the trinucleotide repeat expansion disorder is Huntington's disease.

[0029] In some aspects, the trinucleotide repeat expansion disorder is a non-polyglutamine disease. In some aspects, the non-polyglutamine disease is selected from the group consisting of fragile X syndrome, fragile X-associated tremor/ataxia syndrome, fragile XE mental retardation, Friedreich's ataxia, myotonic dystrophy type 1, spinocerebellar ataxia type 8, spinocerebellar ataxia type 12, oculopharyngeal muscular dystrophy, Fragile X-associated premature ovarian failure, FRA2A syndrome, FRA7A syndrome, and early infantile epileptic encephalopathy. In some aspects, the trinucleotide repeat expansion disorder is Friedreich's ataxia. In some aspects, the trinucleotide repeat expansion disorder is myotonic dystrophy type 1.

[0030] In some aspects, the application is directed one or more of the oligonucleotides described herein, a pharmaceutical composition of one or more of the oligonucleotides described herein, or the composition of one or more oligonucleotides described herein and a lipid nanoparticle, a polyplex nanoparticle, a lipoplex nanoparticle, or a liposome, for use in the prevention or treatment of a trinucleotide repeat expansion disorder.

[0031] In some aspects, the one or more of the oligonucleotides described herein, the pharmaceutical composition of one or more of the oligonucleotides described herein, or the composition of one or more oligonucleotides described herein and a lipid nanoparticle, a polyplex nanoparticle, a lipoplex nanoparticle, or a liposome is administered intrathecally.

[0032] In some aspects, the one or more of the oligonucleotides described herein, the pharmaceutical composition of one or more of the oligonucleotides described herein, or the composition of one or more oligonucleotides described herein and a lipid nanoparticle, a polyplex nanoparticle, a lipoplex nanoparticle, or a liposome is administered intraventricularly.

[0033] In some aspects, the one or more of the oligonucleotides described herein, the pharmaceutical composition of one or more of the oligonucleotides described herein, or the composition of one or more oligonucleotides described herein and a lipid nanoparticle, a polyplex nanoparticle, a lipoplex nanoparticle, or a liposome is administered intramuscularly.

[0034] In some aspects, the application is directed to a method of treating, preventing, or delaying progression a disorder in a subject in need thereof wherein the subject is suffering from trinucleotide repeat expansion disorder, comprising administering to said subject one or more of the oligonucleotides described herein, the pharmaceutical composition of one or more of the oligonucleotides described herein, or the composition of one or more oligonucleotides described herein and a lipid nanoparticle, a polyplex nanoparticle, a lipoplex nanoparticle, or a liposome.

[0035] In some aspects, the method of treating, preventing, or delaying progression of a disorder in a subject further comprises administering an additional therapeutic agent. In some aspects, the additional therapeutic agent is another oligonucleotide that hybridizes to an mRNA encoding the Huntingtin gene.

[0036] In some aspects, the method of treating, preventing, or delaying progression of a disorder in a subject progression delays progression of the trinucleotide repeat expansion disorder by at least 120 days, for example, at least 6 months, at least 12 months, at least 2 years, at least 3 years, at least 4 years, at least 5 years, at least 10 years or more, when compared with a predicted progression.

[0037] In some aspects, the application is directed to one or more of the oligonucleotides described herein, the pharmaceutical composition of one or more of the oligonucleotides described herein, or the composition of one or more oligonucleotides described herein and a lipid nanoparticle, a polyplex nanoparticle, a lipoplex nanoparticle, or a liposome for use in preventing or delaying progression of a trinucleotide repeat expansion disorder in a subject

### Definitions

[0038] For convenience, the meaning of some terms and phrases used in the specification, examples, and appended claims are provided below. Unless stated otherwise, or implicit from context, the following terms and phrases include the meanings provided below. The definitions are provided to aid in describing particular aspects, and are not intended to limit the claimed technology, because the scope of the technology is limited only by the claims. Unless otherwise defined, all technical and scientific terms used herein have the same meaning as commonly understood by one of ordinary skill in the art to which this technology belongs. If there is an apparent discrepancy between the usage of a term in the art and its definition provided herein, the definition provided within the specification shall prevail.

[0039] In this application, unless otherwise clear from context, (i) the term “a” can be understood to mean “at least one”; (ii) the term “or” can be understood to mean “and/or”; and (iii) the terms “including” and “comprising” can be understood to encompass itemized components or steps whether presented by themselves or together with one or more additional components or steps.

[0040] As used herein, the terms “about” and “approximately” refer to a value that is within 10% above or below the value being described. For example, the term “about 5 nM” indicates a range of from 4.5 to 5.5 nM.

[0041] The term “at least” prior to a number or series of numbers is understood to include the number adjacent to the term “at least”, and all subsequent numbers or integers that could logically be included, as clear from context. For example, the number of nucleotides in a nucleic acid molecule must be an integer. For example, “at least 18 nucleotides of a 21-nucleotide nucleic acid molecule” means that 18, 19, 20, or 21 nucleotides have the indicated property. When at least is present before a series of numbers or a range, it is understood that “at least” can modify each of the numbers in the series or range. “At least” is also not limited to integers (e.g., “at least 5%” includes 5.0%, 5.1%, 5.18% without consideration of the number of significant figures.

[0042] As used herein, “no more than” or “less than” is understood as the value adjacent to the phrase and logical lower values or integers, as logical from context, to zero. For example, an oligonucleotide with “no more than 3 mismatches to a target sequence” has 3, 2, 1, or 0 mismatches to a target sequence. When “no more than” is present before a series of numbers or a range, it is understood that “no more than” can modify each of the numbers in the series or range.

[0043] As used herein, the term “administration” refers to the administration of a composition (e.g., a compound or a preparation that includes a compound as described herein) to a subject or system. Administration to an animal subject (e.g., to a human) can be by any appropriate route, such as one described herein.

[0044] As used herein, a “combination therapy” or “administered in combination” means that two (or more) different agents or treatments are administered to a subject as part of a defined treatment regimen for a particular disease or condition. The treatment regimen defines the doses and periodicity of administration of each agent such that the effects of the separate agents on the subject overlap. In some aspects, the delivery of the two or more agents is simultaneous or concurrent and the agents can be co-formulated. In some aspects, the two or more agents are not co-formulated and are administered in a sequential manner as part of a prescribed regimen. In some aspects, administration of two or more agents or treatments in combination is such that the reduction in a symptom, or other parameter related to the disorder is greater than what would be observed with one agent or treatment delivered alone or in the absence of the other. The effect of the two treatments can be partially additive, wholly additive, or greater than additive (e.g., synergistic). Sequential or substantially simultaneous administration of each therapeutic agent can be effected by any appropriate route including, but not limited to, oral routes, intravenous routes, intramuscular routes, and direct absorption through mucous membrane tissues. The therapeutic agents can be administered by the same route or by different routes. For example, one therapeutic agent of the combination can be administered by intravenous injection while another therapeutic agent of the combination can be administered orally.

[0045] As used herein, the term “MLH3” refers to mutL homolog 3, a DNA mismatch repair protein, having an amino acid sequence from any vertebrate or mammalian source, including, but not limited to, human, bovine, chicken, rodent, mouse, rat, porcine, ovine, primate, monkey, and guinea pig, unless specified otherwise. The term also refers to fragments and variants of native MLH3 that maintain at least one in vivo or in vitro activity of a native MLH3. The term encompasses full-length unprocessed precursor forms of MLH3 as well as mature forms resulting from post-translational cleavage of the signal peptide. MLH3 is encoded by the MLH3 gene. The nucleic acid sequence of an exemplary Homo sapiens (human) MLH3 gene is set forth in NCBI Reference No. NM_001040108.1 or in SEQ ID NO: 1. The term “MLH3” also refers to natural variants of the wild-type MLH3 protein, such as proteins having at least 85% identity (e.g., 85%, 86%, 87%, 88%, 89%, 90%, 91%, 92%, 93%, 94%, 95%, 96%, 97%, 98%, 99%, 99.9% identity, or more) to the amino acid sequence of wild-type human MLH3, which is set forth in NCBI Reference No. NP_001035197.1 or in SEQ ID NO: 2. The nucleic acid sequence of an exemplary Mus musculus (mouse) MLH3 gene is set forth in NCBI Reference No. NM_175337.2 or in SEQ ID NO: 3. The nucleic acid sequence of an exemplary Rattus norvegicus (rat) MLH3 gene is set forth in NCBI Reference No. NM_001108043.1 or in SEQ ID NO: 4. The nucleic acid sequence of an exemplary Macaca fascicularis (cyno) MLH3 gene is set forth in NCBI Reference XM_005561790.2 or in SEQ ID NO: 5.

[0046] The term “MLH3” as used herein, also refers to a particular polypeptide expressed in a cell by naturally occurring DNA sequence variations of the MLH3 gene, such as a single nucleotide polymorphism in the MLH3 gene. Numerous SNPs within the MLH3 gene have been identified and can be found at, for example, NCBI dbSNP (see, e.g., www.ncbi.nlm.nih.gov/snp). Non-limiting examples of SNPs within the MLH3 gene can be found at, NCBI dbSNP Accession Nos.: rs28757011; rs28756991; rs28756990; rs28756982; rs28756981; rs17782839; rs7156586; rs175081; rs175080; rs175057; rs175049; rs108621; rs13712; and rs7303.

[0047] As used herein, “target sequence” refers to a contiguous portion of the nucleotide sequence of an mRNA molecule formed during the transcription of an MLH3 gene, including mRNA that is a product of RNA processing of a primary transcription product. In one aspect, the target portion of the sequence will be at least long enough to serve as a substrate for oligonucleotide-directed (e.g., antisense oligonucleotide (ASO)-directed) cleavage at or near that portion of the nucleotide sequence of an mRNA molecule formed during the transcription of a MLH3 gene. The target sequence can be, for example, from about 9-36 nucleotides in length, e.g., about 15-30 nucleotides in length. For example, the target sequence can be 15, 16, 17, 18, 19, 20, 21, 22, 23, 24, 25, 26, 27, 28, 29, or 30 or from about 15-30 nucleotides, 15-29, 15-28, 15-27, 15-26, 15-25, 15-24, 15-23, 15-22, 15-21, 15-20, 15-19, 15-18, 15-17, 18-30, 18-29, 18-28, 18-27, 18-26, 18-25, 18-24, 18-23, 18-22, 18-21, 18-20, 19-30, 19-29, 19-28, 19-27, 19-26, 19-25, 19-24, 19-23, 19-22, 19-21, 19-20, 20-30, 20-29, 20-28, 20-27, 20-26, 20-25, 20-24, 20-23, 20-22, 20-21, 21-30, 21-29, 21-28, 21-27, 21-26, 21-25, 21-24, 21-23, or 21-22 nucleotides in length. Ranges and lengths intermediate to the above recited ranges and lengths are also contemplated to be.

[0048] “G,” “C,” “A,” “T,” and “U” each generally stand for a naturally-occurring nucleotide that contains guanine, cytosine, adenine, thymidine, and uracil as a base, respectively. However, it will be understood that the term “nucleotide” can refer to an alternative nucleotide, as further detailed below, or a surrogate replacement moiety. The skilled person is well aware that guanine, cytosine, adenine, and uracil can be replaced by other moieties without substantially altering the base pairing properties of an oligonucleotide comprising a nucleotide bearing such replacement moiety. For example, without limitation, a nucleotide comprising inosine as its base can base pair with nucleotides containing adenine, cytosine, or uracil. Hence, nucleotides containing uracil, guanine, or adenine can be replaced in the nucleotide sequences of oligonucleotides described herein by a nucleotide containing, for example, inosine. In another example, adenine and cytosine anywhere in the oligonucleotide can be replaced with guanine and uracil, respectively to form G-U Wobble base pairing with the target mRNA. Sequences containing such replacement moieties are suitable for the compositions and methods described herein.

[0049] The terms “nucleobase” and “base” include the purine (e.g. adenine and guanine) and pyrimidine (e.g. uracil, thymine, and cytosine) moiety present in nucleosides and nucleotides which form hydrogen bonds in nucleic acid hybridization. The term nucleobase also encompasses alternative nucleobases which can differ from naturally-occurring nucleobases, but are functional during nucleic acid hybridization. In this context “nucleobase” refers to both naturally occurring nucleobases such as adenine, guanine, cytosine, thymidine, uracil, xanthine, and hypoxanthine, as well as alternative nucleobases. Such variants are for example described in Hirao et al (2012) Accounts of Chemical Research vol 45 page 2055 and Bergstrom (2009) Current Protocols in Nucleic Acid Chemistry Suppl. 37 1.4.1.

[0050] The term “nucleoside” refers to a monomeric unit of an oligonucleotide or a polynucleotide having a nucleobase and a sugar moiety. A nucleoside can include those that are naturally-occurring as well as alternative nucleosides, such as those described herein. The nucleobase of a nucleoside can be a naturally-occurring nucleobase or an alternative nucleobase. Similarly, the sugar moiety of a nucleoside can be a naturally-occurring sugar or an alternative sugar.

[0051] The term “alternative nucleoside” refers to a nucleoside having an alternative sugar or an alternative nucleobase, such as those described herein.

[0052] In some aspects, the nucleobase moiety is modified by changing the purine or pyrimidine into a modified purine or pyrimidine, such as substituted purine or substituted pyrimidine, such as an “alternative nucleobase” selected from isocytosine, pseudoisocytosine, 5-methyl cytosine, 5-thiozolo-cytosine, 5-propynyl-cytosine, 5-propynyl-uridine, 5-bromouridine 5-thiazolo-uridine, 2-thio-uridine, pseudouridine, 1-methylpseudouridine, 5-methoxyuridine, 2′-thio-thymine, inosine, diaminopurine, 6-aminopurine, 2-aminopurine, 2,6-diaminopurine, and 2-chloro-6-aminopurine.

[0053] The nucleobase moieties can be indicated by the letter code for each corresponding nucleobase, e.g. A, T, G, C, or U, wherein each letter can include alternative nucleobases of equivalent function. In some aspects, e.g., for gapmers, 5-methyl cytosine LNA nucleosides can be used.

[0054] A “sugar” or “sugar moiety,” includes naturally occurring sugars having a furanose ring. A sugar also includes an “alternative sugar,” defined as a structure that is capable of replacing the furanose ring of a nucleoside. In some aspects, alternative sugars are non-furanose (or 4′-substituted furanose) rings or ring systems or open systems. Such structures include simple changes relative to the natural furanose ring, such as a six-membered ring, or can be more complicated as is the case with the non-ring system used in peptide nucleic acid. Alternative sugars can include sugar surrogates wherein the furanose ring has been replaced with another ring system such as, for example, a morpholino or hexitol ring system. Sugar moieties useful in the preparation of oligonucleotides having motifs include, without limitation, β-D-ribose, β-D-2′-deoxyribose, substituted sugars (such as 2′, 5′ and bis substituted sugars), 4′-S-sugars (such as 4′-S-ribose, 4′-S-2′-deoxyribose and 4′-S-2′-substituted ribose), bicyclic alternative sugars (such as the 2′-O—CH₂-4′ or 2′-O—(CH₂)₂-4′ bridged ribose derived bicyclic sugars) and sugar surrogates (such as when the ribose ring has been replaced with a morpholino or a hexitol ring system). The type of heterocyclic base and internucleoside linkage used at each position is variable and is not a factor in determining the motif. In most nucleosides having an alternative sugar moiety, the heterocyclic nucleobase is generally maintained to permit hybridization.

[0055] A “nucleotide,” as used herein, refers to a monomeric unit of an oligonucleotide or polynucleotide that comprises a nucleoside and an internucleosidic linkage. The internucleosidic linkage can include a phosphate linkage. Similarly, “linked nucleosides” can be linked by phosphate linkages. Many “alternative internucleosidic linkages” are known in the art, including, but not limited to, phosphate, phosphorothioate, and boronophosphate linkages. Alternative nucleosides include bicyclic nucleosides (BNAs) (e.g., locked nucleosides (LNAs) and constrained ethyl (cEt) nucleosides), peptide nucleosides (PNAs), phosphotriesters, phosphorothionates, phosphoramidates, and other variants of the phosphate backbone of native nucleoside, including those described herein.

[0056] An “alternative nucleotide,” as used herein, refers to a nucleotide having an alternative nucleoside or an alternative sugar, and an internucleoside linkage, which can include alternative nucleoside linkages.

[0057] The terms “oligonucleotide” and “polynucleotide,” as used herein, are defined as it is generally understood by the skilled person as a molecule comprising two or more covalently linked nucleosides. Such covalently bound nucleosides can be referred to as nucleic acid molecules or oligomers. Oligonucleotides are commonly made in the laboratory by solid-phase chemical synthesis followed by purification. When referring to a sequence of the oligonucleotide, reference is made to the sequence or order of nucleobase moieties, or modifications thereof, of the covalently linked nucleotides or nucleosides. The oligonucleotide can be man-made. For example, the oligonucleotide can be chemically synthesized, and be purified or isolated. Oligonucleotide is also intended to include (i) compounds that have one or more furanose moieties that are replaced by furanose derivatives or by any structure, cyclic or acyclic, that can be used as a point of covalent attachment for the base moiety, (ii) compounds that have one or more phosphodiester linkages that are either modified, as in the case of phosphoramidate or phosphorothioate linkages, or completely replaced by a suitable linking moiety as in the case of formacetal or riboacetal linkages, and/or (iii) compounds that have one or more linked furanose-phosphodiester linkage moieties replaced by any structure, cyclic or acyclic, that can be used as a point of covalent attachment for the base moiety. The oligonucleotide can comprise one or more alternative nucleosides or nucleotides (e.g., including those described herein). It is also understood that oligonucleotide includes compositions lacking a sugar moiety or nucleobase but is still capable of forming a pairing with or hybridizing to a target sequence.

[0058] “Oligonucleotide” refers to a short polynucleotide (e.g., of 100 or fewer linked nucleosides).

[0059] “Chimeric” oligonucleotides or “chimeras,” as used herein, are oligonucleotides which contain two or more chemically distinct regions, each made up of at least one monomer unit, i.e., a nucleotide or nucleoside in the case of an oligonucleotide. Chimeric oligonucleotides also include “gapmers.”

[0060] The oligonucleotide can be of any length that permits specific degradation of a desired target RNA through an RNase H-mediated pathway, and can range from about 10-30 nucleosides in length, e.g., about 15-30 nucleosides in length or about 18-20 nucleosides in length, for example, about 10, 11, 12, 13, 14, 15, 16, 17, 18, 19, 20, 21, 22, 23, 24, 25, 26, 27, 28, 29, or 30 nucleosides in length, such as about 15-30, 15-29, 15-28, 15-27, 15-26, 15-25, 15-24, 15-23, 15-22, 15-21, 15-20, 15-19, 15-18, 15-17, 18-30, 18-29, 18-28, 18-27, 18-26, 18-25, 18-24, 18-23, 18-22, 18-21, 18-20, 19-30, 19-29, 19-28, 19-27, 19-26, 19-25, 19-24, 19-23, 19-22, 19-21, 19-20, 20-30, 20-29, 20-28, 20-27, 20-26, 20-25, 20-24, 20-23, 20-22, 20-21, 21-30, 21-29, 21-28, 21-27, 21-26, 21-25, 21-24, 21-23, or 21-22 nucleosides in length. Ranges and lengths intermediate to the above recited ranges and lengths are also contemplated

[0061] As used herein, the term “oligonucleotide comprising a nucleobase sequence” refers to an oligonucleotide comprising a chain of nucleotides or nucleosides that is described by the sequence referred to using the standard nucleotide nomenclature.

[0062] The term “contiguous nucleobase region” refers to the region of the oligonucleotide which is complementary to the target nucleic acid. The term can be used interchangeably herein with the term “contiguous nucleotide sequence” or “contiguous nucleobase sequence.” In some aspects, all the nucleotides of the oligonucleotide are present in the contiguous nucleotide or nucleoside region. In some aspects, the oligonucleotide comprises the contiguous nucleotide region and can comprise further nucleotide(s) or nucleoside(s), for example a nucleotide linker region which can be used to attach a functional group to the contiguous nucleotide sequence. The nucleotide linker region can be complementary to the target nucleic acid. In some aspects, the internucleoside linkages present between the nucleotides of the contiguous nucleotide region are all phosphorothioate internucleoside linkages. In some aspects, the contiguous nucleotide region comprises one or more sugar-modified nucleosides.

[0063] The term “gapmer,” as used herein, refers to an oligonucleotide which comprises a region of RNase H recruiting oligonucleotides (gap or DNA core) which is flanked 5′ and 3′ by regions which comprise one or more affinity enhancing alternative nucleosides (wings or flanking sequence). Various gapmer designs are described herein. Headmers and tailmers are oligonucleotides capable of recruiting RNase H where one of the flanks is missing, i.e. only one of the ends of the oligonucleotide comprises affinity enhancing alternative nucleosides. For headmers the 3′ flanking sequence is missing (i.e. the 5′ flanking sequence comprises affinity enhancing alternative nucleosides) and for tailmers the 5′ flanking sequence is missing (i.e. the 3′ flanking sequence comprises affinity enhancing alternative nucleosides). A “mixed flanking sequence gapmer” refers to a gapmer wherein the flanking sequences comprise at least one alternative nucleoside, such as at least one DNA nucleoside or at least one 2′ substituted alternative nucleoside, such as, for example, 2′-O-alkyl-RNA, 2′-O-methyl-RNA, 2′-alkoxy-RNA, 2′-O-methoxyethyl-RNA (MOE), 2′-amino-DNA, 2′-Fluoro-RNA, 2′-F-ANA nucleoside(s), or bicyclic nucleosides (e.g., locked nucleosides or constrained ethyl (cEt) nucleosides). In some aspects, the mixed flanking sequence gapmer has one flanking sequence which comprises alternative nucleosides (e.g. 5′ or 3′) and the other flanking sequence (3′ or 5′ respectfully) comprises 2′ substituted alternative nucleoside(s).

[0064] A “linker” or “linking group” is a connection between two atoms that links one chemical group or segment of interest to another chemical group or segment of interest via one or more covalent bonds. Conjugate moieties can be attached to the oligonucleotide directly or through a linking moiety (e.g. linker or tether). Linkers serve to covalently connect a third region, e.g. a conjugate moiety to an oligonucleotide (e.g. the termini of region A or C). In some aspects, the conjugate or oligonucleotide conjugate can comprise a linker region which is positioned between the oligonucleotide and the conjugate moiety. In some aspects, the linker between the conjugate and oligonucleotide is biocleavable. Phosphodiester containing biocleavable linkers are described in more detail in WO 2014/076195 (herein incorporated by reference).

[0065] As used herein, and unless otherwise indicated, the term “complementary,” when used to describe a first nucleotide or nucleoside sequence in relation to a second nucleotide or nucleoside sequence, refers to the ability of an oligonucleotide or polynucleotide comprising the first nucleotide or nucleoside sequence to hybridize and form a duplex structure under certain conditions with an oligonucleotide or polynucleotide comprising the second nucleotide sequence, as will be understood by the skilled person. Such conditions can, for example, be stringent conditions, where stringent conditions can include: 400 mM NaCl, 40 mM PIPES pH 6.4, 1 mM EDTA, 50° C., or 70° C., for 12-16 hours followed by washing (see, e.g., “Molecular Cloning: A Laboratory Manual, Sambrook, et al. (1989) Cold Spring Harbor Laboratory Press). Other conditions, such as physiologically relevant conditions as can be encountered inside an organism, can be used. The skilled person will be able to determine the set of conditions most appropriate for a test of complementarity of two sequences in accordance with the ultimate application of the hybridized nucleotides or nucleosides.

[0066] “Complementary” sequences, as used herein, can include, or be formed entirely from, non-Watson-Crick base pairs and/or base pairs formed from non-natural and alternative nucleotides or nucleosides, in so far as the above requirements with respect to their ability to hybridize are fulfilled. Such non-Watson-Crick base pairs include, but are not limited to, G:U Wobble or Hoogstein base pairing. Complementary sequences between an oligonucleotide and a target sequence as described herein, include base-pairing of the oligonucleotide or polynucleotide comprising a first nucleotide or nucleoside sequence to an oligonucleotide or polynucleotide comprising a second nucleotide or nucleoside sequence over the entire length of one or both nucleotide or nucleoside sequences. Such sequences can be referred to as “fully complementary” with respect to each other herein. However, where a first sequence is referred to as “substantially complementary” with respect to a second sequence herein, the two sequences can be fully complementary, or they can form one or more, but generally not more than 5, 4, 3 or 2 mismatched base pairs upon hybridization for a duplex up to 30 base pairs, while retaining the ability to hybridize under the conditions most relevant to their ultimate application, e.g., inhibition of gene expression via an RNase H-mediated pathway. “Substantially complementary” can refer to a polynucleotide that is substantially complementary to a contiguous portion of the mRNA of interest (e.g., an mRNA encoding MLH3). For example, a polynucleotide is complementary to at least a part of a MLH3 mRNA if the sequence is substantially complementary to a non-interrupted portion of an mRNA encoding MLH3.

[0067] As used herein, the term “region of complementarity” refers to the region on the oligonucleotide that is substantially complementary to all or a portion of a gene, primary transcript, a sequence (e.g., a target sequence, e.g., an MLH3 nucleotide sequence), or processed mRNA, so as to interfere with expression of the endogenous gene (e.g., MLH3). Where the region of complementarity is not fully complementary to the target sequence, the mismatches can be in the internal or terminal regions of the molecule. Generally, the most tolerated mismatches are in the terminal regions, e.g., within 5, 4, 3, or 2 nucleotides of the 5′- and/or 3′-terminus of the oligonucleotide.

[0068] As used herein, an “agent that reduces the level and/or activity of MLH3” refers to any polynucleotide agent (e.g., an oligonucleotide, e.g., an ASO) that reduces the level of or inhibits expression of MLH3 in a cell or subject. The phrase “inhibiting expression of MLH3,” as used herein, includes inhibition of expression of any MLH3 gene (such as, e.g., a mouse MLH3 gene, a rat MLH3 gene, a monkey MLH3 gene, or a human MLH3 gene) as well as variants or mutants of a MLH3 gene that encode a MLH3 protein. Thus, the MLH3 gene can be a wild-type MLH3 gene, a mutant MLH3 gene, or a transgenic MLH3 gene in the context of a genetically manipulated cell, group of cells, or organism.

[0069] By “reducing the activity of MLH3,” is meant decreasing the level of an activity related to MLH3 (e.g., by reducing the amount of trinucleotide repeats in a gene associated with a trinucleotide repeat expansion disorder that is related to MLH3 activity). The activity level of MLH3 can be measured using any method known in the art (e.g., by directly sequencing a gene associated with a trinucleotide repeat expansion disorder to measure the levels of trinucleotide repeats).

[0070] By “reducing the level of MLH3,” is meant decreasing the level of MLH3 in a cell or subject, e.g., by administering an oligonucleotide to the cell or subject. The level of MLH3 can be measured using any method known in the art (e.g., by measuring the levels of MLH3 mRNA or levels of MLH3 protein in a cell or a subject).

[0071] By “modulating the activity of a MutLy heterodimer comprising MLH3,” is meant altering the level of an activity related to a MutLy heterodimer (e.g., e.g., by altering the amount of trinucleotide repeats in a gene associated with a trinucleotide repeat expansion disorder that is related to a MutLy heterodimer. The activity level of a MutLy heterodimer can be measured using any method known in the art (e.g., by directly sequencing a gene associated with a trinucleotide repeat expansion disorder to measure the levels of trinucleotide repeats).

[0072] As used herein, the term “inhibitor” refers to any agent which reduces the level and/or activity of a protein (e.g., MLH3). Non-limiting examples of inhibitors include polynucleotides (e.g., oligonucleotide, e.g., ASOs). The term “inhibiting,” as used herein, is used interchangeably with “reducing,” “silencing,” “downregulating,” “suppressing,” and other similar terms, and includes any level of inhibition.

[0073] As used herein, the term “selective for MLH3 over MLH1” refers to a compound which inhibits the level and/or activity of MLH3 at least 5% (e.g., at least 10%, at least 25%, at least 50%, at least 75%, or at least 100%) greater than the compound inhibits the level and/or activity of MLH1.

[0074] The phrase “contacting a cell with an oligonucleotide,” such as an oligonucleotide, as used herein, includes contacting a cell by any possible means. Contacting a cell with an oligonucleotide includes contacting a cell in vitro with the oligonucleotide or contacting a cell in vivo with the oligonucleotide. The contacting can be done directly or indirectly. Thus, for example, the oligonucleotide can be put into physical contact with the cell by the individual performing the method, or alternatively, the oligonucleotide agent can be put into a situation that will permit or cause it to subsequently come into contact with the cell.

[0075] Contacting a cell in vitro can be done, for example, by incubating the cell with the oligonucleotide. Contacting a cell in vivo can be done, for example, by injecting the oligonucleotide into or near the tissue where the cell is located, or by injecting the oligonucleotide agent into another area, e.g., the bloodstream or the subcutaneous space, such that the agent will subsequently reach the tissue where the cell to be contacted is located. For example, the oligonucleotide can contain and/or be coupled to a ligand, e.g., GalNAc3, that directs the oligonucleotide to a site of interest, e.g., the liver. Combinations of in vitro and in vivo methods of contacting are also possible. For example, a cell can be contacted in vitro with an oligonucleotide and subsequently transplanted into a subject.

[0076] In one aspect, contacting a cell with an oligonucleotide includes “introducing” or “delivering the oligonucleotide into the cell” by facilitating or effecting uptake or absorption into the cell. Absorption or uptake of an ASO can occur through unaided diffusive or active cellular processes, or by auxiliary agents or devices. Introducing an oligonucleotide into a cell can be in vitro and/or in vivo. For example, for in vivo introduction, oligonucleotides can be injected into a tissue site or administered systemically. In vitro introduction into a cell includes methods known in the art such as electroporation and lipofection. Further approaches are described herein below and/or are known in the art.

[0077] As used herein, “lipid nanoparticle” or “LNP” is a vesicle comprising a lipid layer encapsulating a pharmaceutically active molecule, such as a nucleic acid molecule, e.g., an oligonucleotide. LNP refers to a stable nucleic acid-lipid particle. LNPs typically contain a cationic lipid, a non-cationic lipid, and a lipid that prevents aggregation of the particle (e.g., a PEG-lipid conjugate). LNPs are described in, for example, U.S. Pat. Nos. 6,858,225; 6,815,432; 8,158,601; and 8,058,069, the entire contents of which are hereby incorporated herein by reference.

[0078] As used herein, the term “liposome” refers to a vesicle composed of amphiphilic lipids arranged in at least one bilayer, e.g., one bilayer or a plurality of bilayers. Liposomes include unilamellar and multilamellar vesicles that have a membrane formed from a lipophilic material and an aqueous interior. The aqueous portion contains the oligonucleotide composition. The lipophilic material isolates the aqueous interior from an aqueous exterior, which typically does not include the oligonucleotide composition, although in some examples, it can. Liposomes also include “sterically stabilized” liposomes, a term which, as used herein, refers to liposomes comprising one or more specialized lipids that, when incorporated into liposomes, result in enhanced circulation lifetimes relative to liposomes lacking such specialized lipids.

[0079] “Micelles” are defined herein as a particular type of molecular assembly in which amphipathic molecules are arranged in a spherical structure such that all the hydrophobic portions of the molecules are directed inward, leaving the hydrophilic portions in contact with the surrounding aqueous phase. The converse arrangement exists if the environment is hydrophobic.

[0080] The term “antisense,” as used herein, refers to a nucleic acid comprising an oligonucleotide or polynucleotide that is sufficiently complementary to all or a portion of a gene, primary transcript, or processed mRNA, so as to interfere with expression of the endogenous gene (e.g., MLH3). “Complementary” polynucleotides are those that are capable of base pairing according to the standard Watson-Crick complementarity rules. Specifically, purines will base pair with pyrimidines to form a combination of guanine paired with cytosine (G:C) and adenine paired with either thymine (A:T) in the case of DNA, or adenine paired with uracil (A:U) in the case of RNA. It is understood that two polynucleotides can hybridize to each other even if they are not completely complementary to each other, provided that each has at least one region that is substantially complementary to the other.

[0081] As used herein, the terms “effective amount,” “therapeutically effective amount,” and “a “sufficient amount” of an agent that reduces the level and/or activity of MLH3 (e.g., in a cell or a subject) described herein refer to a quantity sufficient to, when administered to the subject, including a human, effect beneficial or desired results, including clinical results, and, as such, an “effective amount” or synonym thereto depends on the context in which it is being applied. For example, in the context of treating a trinucleotide repeat expansion disorder, it is an amount of the agent that reduces the level and/or activity of MLH3 sufficient to achieve a treatment response as compared to the response obtained without administration of the agent that reduces the level and/or activity of MLH3. The amount of a given agent that reduces the level and/or activity of MLH3 described herein that will correspond to such an amount will vary depending upon various factors, such as the given agent, the pharmaceutical formulation, the route of administration, the type of disease or disorder, the identity of the subject (e.g., age, sex, and/or weight) or host being treated, and the like, but can nevertheless be routinely determined by one of skill in the art. Also, as used herein, a “therapeutically effective amount” of an agent that reduces the level and/or activity of MLH3 of the present disclosure is an amount which results in a beneficial or desired result in a subject as compared to a control. As defined herein, a therapeutically effective amount of an agent that reduces the level and/or activity of MLH3 of the present disclosure can be readily determined by one of ordinary skill by routine methods known in the art. Dosage regimen can be adjusted to provide the optimum therapeutic response.

[0082] “Prophylactically effective amount,” as used herein, is intended to include the amount of an oligonucleotide that, when administered to a subject having or predisposed to have a trinucleotide repeat expansion disorder, is sufficient to prevent or ameliorate the disease or one or more symptoms of the disease. Ameliorating the disease includes slowing the course of the disease or reducing the severity of later-developing disease. The “prophylactically effective amount” can vary depending on the oligonucleotide, how the agent is administered, the degree of risk of disease, and the history, age, weight, family history, genetic makeup, the types of preceding or concomitant treatments, if any, and other individual characteristics of the patient to be treated. A prophylactically effective amount can refer to, for example, an amount of the agent that reduces the level and/or activity of MLH3 (e.g., in a cell or a subject) described herein or can refer to a quantity sufficient to, when administered to the subject, including a human, delay the onset of one or more of the trinucleotide repeat disorders described herein by at least 120 days, for example, at least 6 months, at least 12 months, at least 2 years, at least 3 years, at least 4 years, at least 5 years, at least 10 years or more, when compared with the predicted onset.

[0083] A “therapeutically-effective amount” or “prophylactically effective amount” also includes an amount (either administered in a single or in multiple doses) of an oligonucleotide that produces some desired local or systemic effect at a reasonable benefit/risk ratio applicable to any treatment. Oligonucleotides employed in the methods described herein can be administered in a sufficient amount to produce a reasonable benefit/risk ratio applicable to such treatment.

[0084] As used herein, the term “region of complementarity” refers to the region on the oligonucleotide that is substantially complementary to all or a portion of a gene, primary transcript, a sequence (e.g., a target sequence, e.g., an MLH3 nucleotide sequence), or processed mRNA, so as to interfere with expression of the endogenous gene (e.g., MLH3). Where the region of complementarity is not fully complementary to the target sequence, the mismatches can be in the internal or terminal regions of the molecule. Generally, the most tolerated mismatches are in the terminal regions, e.g., within 5, 4, 3, or 2 nucleotides of the 5′- and/or 3′-terminus of the oligonucleotide.

[0085] An “amount effective to reduce trinucleotide repeat expansion” of a particular gene refers to an amount of the agent that reduces the level and/or activity of MLH3 (e.g., in a cell or a subject) described herein, or to a quantity sufficient to, when administered to the subject, including a human, to reduce the trinucleotide repeat expansion of a particular gene (e.g., a gene associated with a trinucleotide repeat expansion disorder described herein).

[0086] As used herein, the term “a subject identified as having a trinucleotide repeat expansion disorder” refers to a subject identified as having a molecular or pathological state, disease or condition of or associated with a trinucleotide repeat expansion disorder, such as the identification of a trinucleotide repeat expansion disorder or symptoms thereof, or to identification of a subject having or suspected of having a trinucleotide repeat expansion disorder who can benefit from a particular treatment regimen.

[0087] As used herein, “trinucleotide repeat expansion disorder” refers to a class of genetic diseases or disorders characterized by excessive trinucleotide repeats (e.g., trinucleotide repeats such as CAG) in a gene or intron in the subject which exceed the normal, stable threshold, for the gene or intron. Nucleotide repeats are common in the human genome and are not normally associated with disease. In some cases, however, the number of repeats expands beyond a stable threshold and can lead to disease, with the severity of symptoms generally correlated with the number of repeats. Trinucleotide repeat expansion disorders include “polyglutamine” and “non-polyglutamine” disorders.

[0088] By “determining the level of a protein” is meant the detection of a protein, or an mRNA encoding the protein, by methods known in the art either directly or indirectly. “Directly determining” means performing a process (e.g., performing an assay or test on a sample or “analyzing a sample” as that term is defined herein) to obtain the physical entity or value. “Indirectly determining” refers to receiving the physical entity or value from another party or source (e.g., a third-party laboratory that directly acquired the physical entity or value). Methods to measure protein level generally include, but are not limited to, western blotting, immunoblotting, enzyme-linked immunosorbent assay (ELISA), radioimmunoassay (RIA), immunoprecipitation, immunofluorescence, surface plasmon resonance, chemiluminescence, fluorescent polarization, phosphorescence, immunohistochemical analysis, matrix-assisted laser desorption/ionization time-of-flight (MALDI-TOF) mass spectrometry, liquid chromatography (LC)-mass spectrometry, microcytometry, microscopy, fluorescence activated cell sorting (FACS), and flow cytometry, as well as assays based on a property of a protein including, but not limited to, enzymatic activity or interaction with other protein partners. Methods to measure mRNA levels are known in the art.

[0089] “Percent (%) sequence identity” with respect to a reference polynucleotide or polypeptide sequence is defined as the percentage of nucleic acids or amino acids in a candidate sequence that are identical to the nucleic acids or amino acids in the reference polynucleotide or polypeptide sequence, after aligning the sequences and introducing gaps (DNA core sequences), if necessary, to achieve the maximum percent sequence identity. Alignment for purposes of determining percent nucleic acid or amino acid sequence identity can be achieved in various ways that are within the capabilities of one of skill in the art, for example, using publicly available computer software such as BLAST, BLAST-2, or Megalign software. Those skilled in the art can determine appropriate parameters for aligning sequences, including any algorithms needed to achieve maximal alignment over the full length of the sequences being compared. For example, percent sequence identity values can be generated using the sequence comparison computer program BLAST. As an illustration, the percent sequence identity of a given nucleic acid or amino acid sequence, A, to, with, or against a given nucleic acid or amino acid sequence, B, (which can alternatively be phrased as a given nucleic acid or amino acid sequence, A that has a certain percent sequence identity to, with, or against a given nucleic acid or amino acid sequence, B) is calculated as follows:

100 multiplied by (the fraction X/Y)

[0090] where X is the number of nucleotides or amino acids scored as identical matches by a sequence alignment program (e.g., BLAST) in that program's alignment of A and B, and where Y is the total number of nucleic acids in B. It will be appreciated that where the length of nucleic acid or amino acid sequence A is not equal to the length of nucleic acid or amino acid sequence B, the percent sequence identity of A to B will not equal the percent sequence identity of B to A.

[0091] By “level” is meant a level or activity of a protein, or mRNA encoding the protein (e.g., MLH3), optionally as compared to a reference. The reference can be any useful reference, as defined herein. By a “decreased level” or an “increased level” of a protein is meant a decrease or increase in protein level, as compared to a reference (e.g., a decrease or an increase by about 5%, about 10%, about 15%, about 20%, about 25%, about 30%, about 35%, about 40%, about 45%, about 50%, about 55%, about 60%, about 65%, about 70%, about 75%, about 80%, about 85%, about 90%, about 95%, about 100%, about 150%, about 200%, about 300%, about 400%, about 500%, or more; a decrease or an increase of more than about 10%, about 15%, about 20%, about 50%, about 75%, about 100%, or about 200%, as compared to a reference; a decrease or an increase by less than about 0.01-fold, about 0.02-fold, about 0.1-fold, about 0.3-fold, about 0.5-fold, about 0.8-fold, or less; or an increase by more than about 1.2-fold, about 1.4-fold, about 1.5-fold, about 1.8-fold, about 2.0-fold, about 3.0-fold, about 3.5-fold, about 4.5-fold, about 5.0-fold, about 10-fold, about 15-fold, about 20-fold, about 30-fold, about 40-fold, about 50-fold, about 100-fold, about 1000-fold, or more). A level of a protein can be expressed in mass/vol (e.g., g/dL, mg/mL, μg/mL, or ng/mL) or percentage relative to total protein or mRNA in a sample.

[0092] The term “pharmaceutical composition,” as used herein, represents a composition containing a compound described herein formulated with a pharmaceutically acceptable excipient, and can be manufactured or sold with the approval of a governmental regulatory agency as part of a therapeutic regimen for the treatment of disease in a mammal. Pharmaceutical compositions can be formulated, for example, for oral administration in unit dosage form (e.g., a tablet, capsule, caplet, gelcap, or syrup); for topical administration (e.g., as a cream, gel, lotion, or ointment); for intravenous administration (e.g., as a sterile solution free of particulate emboli and in a solvent system suitable for intravenous use); for intrathecal injection; for intracerebroventricular injections; for intraparenchymal injection; or in any other pharmaceutically acceptable formulation.

[0093] A “pharmaceutically acceptable excipient,” as used herein, refers any ingredient other than the compounds described herein (for example, a vehicle capable of suspending or dissolving the active compound) and having the properties of being substantially nontoxic and non-inflammatory in a patient. Excipients can include, for example: antiadherents, antioxidants, binders, coatings, compression aids, disintegrants, dyes (colors), emollients, emulsifiers, fillers (diluents), film formers or coatings, flavors, fragrances, glidants (flow enhancers), lubricants, preservatives, printing inks, sorbents, suspensing or dispersing agents, sweeteners, and waters of hydration. Exemplary excipients include, but are not limited to: butylated hydroxytoluene (BHT), calcium carbonate, calcium phosphate (dibasic), calcium stearate, croscarmellose, crosslinked polyvinyl pyrrolidone, citric acid, crospovidone, cysteine, ethylcellulose, gelatin, hydroxypropyl cellulose, hydroxypropyl methylcellulose, lactose, magnesium stearate, maltitol, mannitol, methionine, methylcellulose, methyl paraben, microcrystalline cellulose, polyethylene glycol, polyvinyl pyrrolidone, povidone, pregelatinized starch, propyl paraben, retinyl palmitate, shellac, silicon dioxide, sodium carboxymethyl cellulose, sodium citrate, sodium starch glycolate, sorbitol, starch (corn), stearic acid, sucrose, talc, titanium dioxide, vitamin A, vitamin E, vitamin C, and xylitol.

[0094] As used herein, the term “pharmaceutically acceptable salt” means any pharmaceutically acceptable salt of the compound of any of the compounds described herein. For example, pharmaceutically acceptable salts of any of the compounds described herein include those that are within the scope of sound medical judgment, suitable for use in contact with the tissues of humans and animals without undue toxicity, irritation, allergic response and are commensurate with a reasonable benefit/risk ratio. Pharmaceutically acceptable salts are well known in the art. For example, pharmaceutically acceptable salts are described in: Berge et al., J. Pharmaceutical Sciences 66:1-19, 1977 and in Pharmaceutical Salts: Properties, Selection, and Use, (Eds. P. H. Stahl and C. G. Wermuth), Wiley-VCH, 2008. The salts can be prepared in situ during the final isolation and purification of the compounds described herein or separately by reacting a free base group with a suitable organic acid.

[0095] The compounds described herein can have ionizable groups so as to be capable of preparation as pharmaceutically acceptable salts. These salts can be acid addition salts involving inorganic or organic acids or the salts can, in the case of acidic forms of the compounds described herein, be prepared from inorganic or organic bases. Frequently, the compounds are prepared or used as pharmaceutically acceptable salts prepared as addition products of pharmaceutically acceptable acids or bases. Suitable pharmaceutically acceptable acids and bases and methods for preparation of the appropriate salts are well-known in the art. Salts can be prepared from pharmaceutically acceptable non-toxic acids and bases including inorganic and organic acids and bases. Representative acid addition salts include acetate, adipate, alginate, ascorbate, aspartate, benzenesulfonate, benzoate, bisulfate, borate, butyrate, camphorate, camphorsulfonate, citrate, cyclopentanepropionate, digluconate, dodecylsulfate, ethanesulfonate, fumarate, glucoheptonate, glycerophosphate, hemisulfate, heptonate, hexanoate, hydrobromide, hydrochloride, hydroiodide, 2-hydroxy-ethanesulfonate, lactobionate, lactate, laurate, lauryl sulfate, malate, maleate, malonate, methanesulfonate, 2-naphthalenesulfonate, nicotinate, nitrate, oleate, oxalate, palmitate, pamoate, pectinate, persulfate, 3-phenylpropionate, phosphate, picrate, pivalate, propionate, stearate, succinate, sulfate, tartrate, thiocyanate, toluenesulfonate, undecanoate, and valerate salts. Representative alkali or alkaline earth metal salts include sodium, lithium, potassium, calcium, and magnesium, as well as nontoxic ammonium, quaternary ammonium, and amine cations, including, but not limited to ammonium, tetramethylammonium, tetraethylammonium, methylamine, dimethylamine, trimethylamine, triethylamine, and ethylamine.

[0096] By a “reference” is meant any useful reference used to compare protein or mRNA levels or activity. The reference can be any sample, standard, standard curve, or level that is used for comparison purposes. The reference can be a normal reference sample or a reference standard or level. A “reference sample” can be, for example, a control, e.g., a predetermined negative control value such as a “normal control” or a prior sample taken from the same subject; a sample from a normal healthy subject, such as a normal cell or normal tissue; a sample (e.g., a cell or tissue) from a subject not having a disease; a sample from a subject that is diagnosed with a disease, but not yet treated with a compound described herein; a sample from a subject that has been treated by a compound described herein; or a sample of a purified protein (e.g., any described herein) at a known normal concentration. By “reference standard or level” is meant a value or number derived from a reference sample. A “normal control value” is a pre-determined value indicative of non-disease state, e.g., a value expected in a healthy control subject. Typically, a normal control value is expressed as a range (“between X and Y”), a high threshold (“no higher than X”), ora low threshold (“no lower than X”). A subject having a measured value within the normal control value for a particular biomarker is typically referred to as “within normal limits” for that biomarker. A normal reference standard or level can be a value or number derived from a normal subject not having a disease or disorder (e.g., a trinucleotide repeat expansion disorder); a subject that has been treated with a compound described herein. In some aspects, the reference sample, standard, or level is matched to the sample subject sample by at least one of the following criteria: age, weight, sex, disease stage, and overall health. A standard curve of levels of a purified protein, e.g., any described herein, within the normal reference range can be used as a reference.

[0097] As used herein, the term “subject” refers to any organism to which a composition can be administered, e.g., for experimental, diagnostic, prophylactic, and/or therapeutic purposes. Typical subjects include any animal (e.g., mammals such as mice, rats, rabbits, non-human primates, and humans). A subject can seek or be in need of treatment, require treatment, be receiving treatment, be receiving treatment in the future, or be a human or animal who is under care by a trained professional for a particular disease or condition.

[0098] As used herein, the terms “treat,” “treated,” and “treating” mean both therapeutic treatment and prophylactic or preventative measures wherein the object is to prevent or slow down (lessen) an undesired physiological condition, disorder, or disease, or obtain beneficial or desired clinical results. Beneficial or desired clinical results include, but are not limited to, alleviation of symptoms; diminishment of the extent of a condition, disorder, or disease; stabilized (i.e., not worsening) state of condition, disorder, or disease; delay in onset or slowing of condition, disorder, or disease progression; amelioration of the condition, disorder, or disease state or remission (whether partial or total), whether detectable or undetectable; an amelioration of at least one measurable physical parameter, not necessarily discernible by the patient; or enhancement or improvement of condition, disorder, or disease. Treatment includes eliciting a clinically significant response without excessive levels of side effects. Treatment also includes prolonging survival as compared to expected survival if not receiving treatment.

[0099] As used herein, the terms “variant” and “derivative” are used interchangeably and refer to naturally-occurring, synthetic, and semi-synthetic analogues of a compound, peptide, protein, or other substance described herein. A variant or derivative of a compound, peptide, protein, or other substance described herein can retain or improve upon the biological activity of the original material.

[0100] The details of one or more aspects are set forth in the description below. Other features, objects, and advantages will be apparent from the description and from the claims.

### BRIEF DESCRIPTION OF DRAWINGS

[0101] FIG. 1 is a distribution plot showing the somatic expansion of a human HTT transgene in the striatum as measured by the instability index in R6/2 mice at 4, 8, 12, and 16 weeks of age (4 male and 4 female per age group). The bars are mean values and error bars indicate standard deviation.

[0102] FIG. 2 is a distribution plot showing the somatic expansion of a human HTT transgene in the cerebellum as measured by the instability index in R6/2 mice at 4, 8, 12, and 16 weeks of age (4 male and 4 female per age group).

### DETAILED DESCRIPTION

[0103] The present inventors have found that inhibition or depletion of MLH3 level and/or activity in a cell is effective in the treatment of a trinucleotide repeat expansion disorder. Accordingly, useful compositions and methods to treat trinucleotide repeat expansion disorders, e.g., in a subject in need thereof are provided herein.

[0104] I. Trinucleotide Repeat Expansion Disorders

[0105] Trinucleotide repeat expansion disorders are a family of genetic disorders characterized by the pathogenic expansion of a repeat region within a genomic region. In such disorders, the number of repeats exceeds that of a gene's normal, stable threshold, expanding into a diseased range.

[0106] Trinucleotide repeat expansion disorders generally can be categorized as “polyglutamine” or “non-polyglutamine.” Polyglutamine disorders, including Huntington's disease (HD) and several spinocerebellar ataxias, are caused by a CAG (glutamine) repeats in the protein-coding regions of specific genes. Non-polyglutamine disorders are more heterogeneous and can be caused by CAG trinucleotide repeat expansions in non-coding regions, as in Myotonic dystrophy, or by the expansion of trinucleotide repeats other than CAG that can be in coding or non-coding regions such as the CGG repeat expansion responsible for Fragile X Syndrome.

[0107] Trinucleotide repeat expansion disorders are dynamic in the sense that the number of repeats can vary from generation-to-generation, or even from cell-to-cell in the same individual. Repeat expansion is believed to be caused by polymerase “slipping” during DNA replication. Tandem repeats in the DNA sequence can “loop out” while maintaining complementary base pairing between the parent strand and daughter strands. If the loop structure is formed from the daughter strand, the number of repeats will increase.

[0108] Conversely, if the loop structure is formed from the parent strand, the number of repeats will decrease. It appears that expansion is more common than reduction. In general, the length of repeat expansion is negatively correlated with prognosis; longer repeats are correlated with an earlier age of onset and worsened disease severity. Thus, trinucleotide repeat expansion disorders are subject to “anticipation,” meaning the severity of symptoms and/or age of onset worsen through successive generations of affected families due to the expansion of these repeats from one generation to the next.

[0109] Trinucleotide repeat expansion disorders are well known in the art. Exemplary trinucleotide repeat expansion disorders and the trinucleotide repeats of the genes commonly associated with them are included in Table 1.

TABLE 1
Exemplary Trinucleotide Repeat Expansion Disorders

| Disease | Gene | Nucleotide Repeat |
|---|---|---|
| ARX-nonsyndromic X-linked mental retardation | ARX | GCG |
| (XLMR) | | |
| Baratela-Scott Syndrome | XYLT1 | GGC |
| Blepharophimosis/Ptosis/Epicanthus inversus | FOXL2 | GCG |
| syndrome type II | | |
| Cleidocranial dysplasia (CCD) | RUNX2 | GCG |
| Congenital central hypoventilation | PHOX-2B | GCG |
| Congenital central hypoventilation syndrome | PHOX2B | GCG |
| (CCHS) | | |
| Creutzfeldt-Jakob disease | PRNP | |
| Dentatorubral-pallidoluysian atrophy (DRPLA)/Haw | ATN1 | CAG |
| River syndrome | | |
| Early infantile epileptic encephalopathy (Ohtahara | ARX | GCG |
| syndrome) | | |
| FRA2A syndrome | AFF3 | CGC |
| FRA7A syndrome | ZNF713 | CGG |
| Fragile X mental retardation (FRAX-E) | AFF2/FMR2 | GCC |
| Fragile X Syndrome (FXS) | FMR1 | CGG |
| Fragile X-associated Primary Ovarian Insufficiency | FMR1 | CGG |
| (FXPOI) | | |
| Fragile X-associated Tremor Ataxia Syndrome | FMR1 | CGG |
| (FXTAS) | | |
| Friedreich ataxia (FRDA) | FXN | GAA |
| Fuchs' Corneal Endothelial Dystrophy (FECD) | TCF4 | CTG |
| Hand-foot genital syndrome (HFGS) | HOXA13 | GCG |
| Holoprosencephaly disorder (HPE) | ZIC2 | GCG |
| Huntington disease-like 2 (HDL2) | JPH3 | CTG |
| Huntington's Disease (HD) | HTT | CAG |
| Infantile spasm syndrome/West syndrome (ISS) | ARX | GCG |
| Jacobsen syndrome | | |
| KCNN3-associated (e.g., schizophrenia) | KCNN3 | CAG |
| Multiple Skeletal dysplasias | COMP | GAC |
| Myotonic Dystrophy type 1 (DM1) | DMPK | CTG |
| Myotonic Dystrophy type 2 (DM2) | CNBP | CCTG |
| NCOA3-associated (e.g., increased risk of prostate | NCOA3 | CAG |
| cancer) | | |
| Neuronal intranuclear inclusion disease (NIID) | NOTCH2NLC | GGC |
| Oculopharyngeal Muscular Dystrophy (OPMD) | PABPN1 | GCG |
| Spastic ataxia - Charlevoix-Saguenay | | |
| Spinal Muscular Bulbar Atrophy (SMBA) | AR | CAG |
| Spinocerebellar ataxia type 1 (SCA1) | ATXN1 | CAG |
| Spinocerebellar ataxia type 10 (SCA10) | ATXN10 | ATTCT |
| Spinocerebellar ataxia type 12 (SCA12) | PPP2R2B | CAG |
| Spinocerebellar ataxia type 17 (SCA17) | TBP/ATXN17 | CAG |
| Spinocerebellar ataxia type 2 (SCA2) | ATXN2 | CAG |
| Spinocerebellar ataxia type 3 (SCA3)/Machado- | ATXN3 | CAG |
| Joseph Disease | | |
| Spinocerebellar ataxia type 45 (SCA45) | FAT2 | CAG |
| Spinocerebellar ataxia type 6 (SCA6) | CACNA1A | CAG |
| Spinocerebellar ataxia type 7 (SCA7) | ATXN7 | CAG |
| Spinocerebellar ataxia type 8 (SCA8) | ATXN8 | CTG |
| Syndromic neurodevelopmental disorder with | MAB21L1 | CAG |
| cerebellar, ocular, craniofacial, and genital features | | |
| (COFG syndrome) | | |
| Synpolydactyly (SPD I) | HOXD13 | GCG |
| Synpolydactyly (SPD II) | HOXD12 | GCG |

[0110] The proteins associated with trinucleotide repeat expansion disorders are typically selected based on an experimental association of the protein associated with a trinucleotide repeat expansion disorder to a trinucleotide repeat expansion disorder. For example, the production rate or circulating concentration of a protein associated with a trinucleotide repeat expansion disorder can be elevated or depressed in a population having a trinucleotide repeat expansion disorder relative to a population lacking the trinucleotide repeat expansion disorder. Differences in protein levels can be assessed using proteomic techniques including but not limited to Western blot, immunohistochemical staining, enzyme linked immunosorbent assay (ELISA), and mass spectrometry. Alternatively, the proteins associated with trinucleotide repeat expansion disorders can be identified by obtaining gene expression profiles of the genes encoding the proteins using genomic techniques including, but not limited to, DNA microarray analysis, serial analysis of gene expression (SAGE), and quantitative real-time polymerase chain reaction (qPCR).

[0111] II. Evidence for the Involvement of Mismatch Repair Pathway in Trinucleotide Repeat Expansion

[0112] There is growing evidence that DNA repair pathways, particularly mismatch repair (MMR), are involved in the expansion of trinucleotide repeats. A recent genome-wide association (GWA) analysis led to the identification of loci harboring genetic variations that alter the age at neurological onset of Huntington's disease (HD) (GEM-HD Consortium, Cell. 2015 Jul. 30; 162(3):516-26). The study identified MLH1, the human homolog of the E. coli DNA mismatch repair gene mutL. A subsequent GWA study in polyglutamine disease patients found significant association of age at onset when grouping all polyglutamine diseases (HD and SCAs) with DNA repair genes as a group, as well as significant associations for specific SNPs in FAN1 and PMS2 with the diseases (Bettencourt et al., (2016) Ann. Neurol., 79: 983-990). These results were consistent with those from an earlier study comparing differences in repeat expansion in two different mouse models of Huntington's Disease, which identified Mlh1 and Mlh3 as novel critical modifiers of CAG instability (Pinto et al., (2013) Mismatch Repair Genes Mlh1 and Mlh3 Modify CAG Instability in Huntington's Disease Mice: Genome-Wide and Candidate Approaches. PLoS Genet 9(10): e1003930). Another member of the mismatch repair pathway, 8-oxo-guanine glycosylase (OGG1) has also been implicated in expansion, as somatic expansion was found to be reduced in transgenic mice lacking OGG1 (Kovtun I. V. et al. (2007) Nature 447, 447-452). However, another study found that human subjects containing a Ser326Cys polymorphism in hOGG1, which results in reduced OGG1 activity, results in increased mutant huntingtin (Coppede et al., (2009) Toxicol., 278: 199-203). Likewise, complete inactivation of Fan1, another component of the DNA repair pathway, in a mouse HD model produces somatic CAG expansions (Long et al. (2018) J. Hum Genet., 103: 1-9). MSH3, another component of the mismatch repair pathway, has been reported to be linked to somatic expansion: polymorphisms in Msh3 was associated with somatic instability of the expanded CTG trinucleotide repeat in myotonic dystrophy type 1 (DM1) patients (Morales et al., (2016) DNA Repair 40: 57-66). Furthermore, natural polymorphisms in Msh3 and Mlh1 have been revealed as mediators of mouse strain specific differences in CTG•CAG repeat instability (Pinto et al. (2013) ibid; Tome et al., (2013) PLoS Genet. 9 e1003280). Further evidence of Msh2 and Msh3's involvement in expansion repeats was reported in a study in which short hairpin RNA (shRNA) knockdown of either MSH2 or MSH3 slowed, and ectopic expression of either MSH2 or MSH3 induced GAA trinucleotide repeat expansion of the Friedreich Ataxia (FRDA) gene in fibroblasts derived from FRDA patients (Halabi et al., (2012) J. Biol. Chem. 287, 29958-29967). In spite of some inconsistent results provided above, there is strong evidence that the MMR pathway plays some role in the expansion of trinucleotide repeats in various disorders. Moreover, they are the first to recognize that the inhibition of the MMR pathway provides for the treatment or prevention of these repeat expansion disorders; however, no therapy is currently available or in development which modulates MMR for purposes of treating or preventing these repeat expansion disorders.

[0113] III. Oligonucleotide Agents

[0114] Agents described herein that reduce the level and/or activity of MLH3 in a cell can be, for example, a polynucleotide, e.g., an oligonucleotide. These agents reduce the level of an activity related to MLH3, or a related downstream effect, or reduce the level of MLH3 in a cell or subject.

[0115] In some aspects, the agent that reduces the level and/or activity of MLH3 is a polynucleotide. In some aspects, the polynucleotide is a single-stranded oligonucleotide, e.g., that acts by way of an RNase H-mediated pathway. Oligonucleotides include DNA and DNA/RNA chimeric molecules, typically about 10 to 30 nucleotides in length, which recognize polynucleotide target sequences or sequence portions through hydrogen bonding interactions with the nucleotide bases of the target sequence (e.g., MLH3). An oligonucleotide molecule can decrease the expression level (e.g., protein level or mRNA level) of MLH3. For example, an oligonucleotide includes oligonucleotides that targets full-length MLH3. In some aspects, the oligonucleotide molecule recruits an RNase H enzyme, leading to target mRNA degradation.

[0116] In some aspects, the oligonucleotide decreases the level and/or activity of a positive regulator of function. In other aspects, the oligonucleotide increases the level and/or activity of an inhibitor of a positive regulator of function. In some aspects, the oligonucleotide increases the level and/or activity of a negative regulator of function.

[0117] In some aspects, the oligonucleotide decreases the level and/or activity or function of MLH3. In some aspects, the oligonucleotide inhibits expression of MLH3. In other aspects, the oligonucleotide increases degradation of MLH3 and/or decreases the stability (i.e., half-life) of MLH3. The oligonucleotide can be chemically synthesized.

[0118] The oligonucleotide includes an oligonucleotide having a region of complementarity (e.g., a contiguous nucleobase region) which is complementary to at least a part of an mRNA formed in the expression of a MLH3 gene. The region of complementarity can be about 30 nucleotides or less in length (e.g., about 30, 29, 28, 27, 26, 25, 24, 23, 22, 21, 20, 19, or 18 nucleotides or less in length). Upon contact with a cell expressing the MLH3 gene, the oligonucleotide can inhibit the expression of the MLH3 gene (e.g., a human, a primate, a non-primate, or a bird MLH3 gene) by at least about 10% as assayed by, for example, a PCR or branched DNA (bDNA)-based method, or by a protein-based method, such as by immunofluorescence analysis, using, for example, Western Blotting or flowcytometric techniques.

[0119] Similarly, the region of complementarity to the target sequence can be between 10 and 30 linked nucleosides in length, e.g., 10, 11, 12, 13, 14, 15, 16, 17, 18, 19, 20, 21, 22, 23, 24, 25, 26, 27, 28, 29, or 30 or between 10-29, 10-28, 10-27, 10-26, 10-25, 10-24, 10-23, 10-22, 10-21, 10-20, 10-19, 10-18, 10-17, 10-16, 10-15, 10-14, 10-13, 10-12, 15-29, 15-28, 15-27, 15-26, 15-25, 15-24, 15-23, 15-22, 15-21, 15-20, 15-19, 15-18, 15-17, 18-30, 18-29, 18-28, 18-27, 18-26, 18-25, 18-24, 18-23, 18-22, 18-21, 18-20, 19-30, 19-29, 19-28, 19-27, 19-26, 19-25, 19-24, 19-23, 19-22, 19-21, 19-20, 20-30, 20-29, 20-28, 20-27, 20-26, 20-25, 20-24, 20-23, 20-22, 20-21, 21-30, 21-29, 21-28, 21-27, 21-26, 21-25, 21-24, 21-23, or 21-22 linked nucleosides in length. Ranges and lengths intermediate to the above recited ranges and lengths are also contemplated.

[0120] An oligonucleotide can be synthesized by standard methods known in the art as further discussed below, e.g., by use of an automated DNA synthesizer, such as are commercially available from, for example, Biosearch, Applied Biosystems, Inc.

[0121] The oligonucleotide compound can be prepared using solution-phase or solid-phase organic synthesis or both. Organic synthesis offers the advantage that the oligonucleotide comprising unnatural or alternative nucleotides can be easily prepared. Single-stranded oligonucleotides can be prepared using solution-phase or solid-phase organic synthesis or both.

[0122] In one aspect, an oligonucleotide described herein includes a region of at least 10 contiguous nucleobases having at least 80% (e.g., at least 85%, at least 90%, at least 95%, or at least 99%) complementary to at least 10 contiguous nucleotides of a MLH3 gene. In some aspects, the oligonucleotide comprises a sequence complementary to at least 17 contiguous nucleotides, 19-23 contiguous nucleotides, 19 contiguous nucleotides, or 20 contiguous nucleotides of a MLH3 gene. The oligonucleotide sequence can be selected from the group of sequences provided in any one of SEQ ID NOs: 6-4710.

[0123] In one aspect, the sequence is substantially complementary to a sequence of an mRNA generated in the expression of a MLH3 gene. In some aspects, the region of at least 10 nucleobases is complementary to an MLH3 gene corresponding to a sequence of reference mRNA NM_001040108.1 at one or more of positions 221-293, 321-506, 534-576, 584-636, 681-740, 818-878, 952-1024, 1129-1158, 1177-1264, 1287-1318, 1351-1378, 1536-1598, 1623-1660, 1739-1764, 1782-1823, 1847-1908, 2026-2051, 2063-2094, 2115-2146, 2256-2290, 2387-2414, 2421-2592, 2727-2788, 2826-2937, 3005-3043, 3078-3107, 3159-3185, 3214-3239, 3244-3272, 3282-3308, 3426-3483, 3561-3587, 3642-3769, 3804-3839, 3950-3977, 4004-4040, 4052-4115, 4139-4199, 4241-4301, 4328-4365, 4420-4448, 4472-4536, 4669-4708, and 4784-4810 of the MLH3 gene. In some aspects, the region of at least 10 nucleobases is complementary to an MLH3 gene corresponding to a sequence of reference mRNA NM_001040108.1 at one or more of positions 221-293, 321-506, 534-576, 584-636, 681-740, 818-878, 952-1024, 1129-1158, 1177-1264, 1287-1318, 1351-1378, 1568-1598, 1623-1660, 1782-1823, 1870-1904, 2063-2094, 2115-2146, 2256-2287, 2387-2414, 2422-2592, 2727-2788, 2826-2937, 3009-3043, 3078-3107, 3159-3185, 3214-3272, 3282-3307, 3426-3483, 3561-3587, 3642-3767, 3804-3839, 3950-3977, 4004-4039, 4052-4115, 4139-4199, 4241-4301, 4329-4365, 4420-4448, 4472-4536, 4680-4708, and 4784-4810 of the MLH3 gene. In some aspects, the region of at least 10 nucleobases is complementary to an MLH3 gene corresponding to a sequence of reference mRNA NM_001040108.1 at one or more of positions 221-293, 321-506, 534-635, 681-740, 842-875, 953-1024, 1129-1158, 1179-1264, 1287-1316, 1351-1378, 1568-1598, 1623-1659, 1782-1823, 1870-1904, 2064-2091, 2115-2146, 2256-2287, 2387-2414, 2422-2592, 2727-2788, 2829-2937, 3010-3043, 3079-3107, 3159-3185, 3246-3271, 3282-3307, 3426-3474, 3561-3587, 3642-3707, 3804-3839, 3950-3977, 4004-4039, 4052-4114, 4139-4164, 4174-4199, 4241-4288, 4329-4365, 4421-4448, 4472-4536, 4680-4708, and 4784-4810 of the MLH3 gene. In some aspects, the region of at least 10 nucleobases is complementary to an MLH3 gene corresponding to a sequence of reference mRNA NM_001040108.1 at one or more of positions 331-362, 393-438, 479-505, 534-574, 587-612, 681-740, 847-873, 991-1024, 1210-1262, 1351-1378, 1571-1597, 1623-1648, 1874-1902, 2066-2091, 2256-2281, 2388-2414, 2470-2515, 2732-2788, 2853-2878, 2901-2927, 3282-3307, 3562-3587, 4056-4083, 4241-4266, and 4506-4531 of the MLH3 gene. In some aspects, the region of at least 10 nucleobases is complementary to an MLH3 gene corresponding to a sequence of reference mRNA NM_001040108.1 at one or more of positions 335-449, 587-612, 682-736, 848-873, 991-1016, 1179-1204, 1233-1260, 1351-1378, 1626-1651, 1874-1903, 2066-2091, 2115-2146, 2256-2287, 2389-2414, 2471-2499, 2762-2787, 2853-2878, 2911-2936, 3562-3587, 3814-3839, 4006-4031, 4056-4083, and 4244-4269 of the MLH3 gene. In some aspects, the region of at least 10 nucleobases is complementary to an MLH3 gene corresponding to a sequence of reference mRNA NM_001040108.1 at one or more of positions 355-393, 952-984, 1177-1205, 2026-2052, 2066-2094, 2470-2498, 3159-3185, 3458-3485, and 4259-4292 of the MLH3 gene.

[0124] In some aspects, the oligonucleotide comprises the nucleobase sequence of any one of SEQ ID NOs: 6-4710. In some aspects, the oligonucleotide comprises the nucleobase sequence of any one of SEQ ID NOs: 89, 92, 102, 107-108, 110-111, 115-116, 150, 154, 160-161, 163-164, 166, 168, 175-176, 178, 180, 182-183, 185-189, 201, 211-212, 229-231, 234-238, 241, 248-250, 254, 265-269, 282-283, 285-288, 294, 296, 319-322, 328-329, 366-368, 377-379, 381-399, 487-488, 511, 514-517, 520, 566-568, 573, 591, 593-594, 599, 602, 666, 669-670, 701-704, 728, 749-753, 755, 757, 784, 786-788, 790, 828-830, 959, 972, 974-977, 1002, 1004-1005, 1007, 1009-1013, 1086, 1110-1111, 1126, 1149, 1172, 1176-1181, 1185, 1260, 1271-1274, 1276-1277, 1297, 1302, 1387-1390, 1392-1393, 1396, 1461-1463, 1473-1474, 1482, 1490-1491, 1495, 1498-1502, 1505, 1508, 1510-1514, 1516-1518, 1525-1526, 1529-1530, 1546-1547, 1572, 1596-1597, 1721-1722, 1724-1727, 1744-1746, 1797, 1800-1802, 1824-1826, 1832, 1835-1836, 1859, 1865-1866, 1870-1873, 1875, 1878, 1880-1882, 1911, 1914-1918, 1924, 1945-1946, 1949, 2000-2001, 2035, 2064, 2066-2067, 2090-2091, 2163, 2166, 2169-2172, 2178, 2181, 2184, 2186, 2194, 2255-2256, 2307, 2321, 2333, 2343, 2345-2346, 2353-2355, 2394-2395, 2403-2404, 2460-2462, 2489-2492, 2495, 2499-2500, 2524-2530, 2561-2562, 2591, 2595, 2616, 2644-2651, 2653-2654, 2661-2664, 2674, 2683-2685, 2687, 2690-2691, 2693-2695, 2725-2728, 2777-2782, 2784-2785, 2789, 2791-2792, 2794-2795, 2797, 2848-2852, and 2917-2918. In some aspects, the oligonucleotide comprises the nucleobase sequence of any one of SEQ ID NOs: 89, 92, 102, 107-108, 111, 116, 150, 154, 160-161, 163-164, 166, 168, 175-176, 178, 180, 182-183, 185-189, 201, 211-212, 229-231, 234-236, 238, 241, 248-250, 254, 265-269, 282-283, 285-288, 294, 296, 319-320, 322, 328-329, 366-368, 377, 379, 381-399, 487-488, 511, 514-517, 520, 566-568, 573, 591, 593-594, 599, 602, 666, 669-670, 701-704, 728, 750-753, 755, 757, 784, 786-788, 790, 828-830, 972, 974-977, 1002, 1004-1005, 1009-1013, 1110-1111, 1126, 1172, 1176-1181, 1271-1274, 1276-1277, 1297, 1302, 1387, 1390, 1392-1393, 1461-1463, 1474, 1482, 1490-1491, 1498-1502, 1505, 1508, 1510-1512, 1514, 1516-1518, 1525-1526, 1529-1530, 1546-1547, 1572, 1597, 1721-1722, 1724-1727, 1744-1746, 1797, 1800-1801, 1824-1826, 1832, 1835-1836, 1859, 1866, 1870-1873, 1878, 1880-1882, 1915-1917, 1924, 1945-1946, 1949, 2000-2001, 2035, 2064, 2066-2067, 2090, 2163, 2166, 2169-2172, 2178, 2181, 2184, 2186, 2194, 2255-2256, 2307, 2321, 2333, 2343, 2345, 2353, 2394-2395, 2403-2404, 2460-2462, 2489, 2491-2492, 2495, 2499, 2524-2525, 2527-2530, 2561-2562, 2591, 2595, 2616, 2644-2651, 2653-2654, 2661-2664, 2674, 2684, 2693-2695, 2725-2728, 2777-2782, 2784-2785, 2789, 2791-2792, 2794-2795, 2797, 2849-2852, and 2917-2918. In some aspects, the oligonucleotide comprises the nucleobase sequence of any one of SEQ ID NOs: 89, 102, 111, 116, 150, 154, 160-161, 163-164, 166, 168, 175-176, 178, 180, 183, 185-189, 201, 211-212, 229-231, 235-236, 238, 241, 250, 254, 265-269, 282-283, 286-288, 294, 296, 319, 322, 328, 366-368, 377, 379, 381-399, 511, 514-517, 567-568, 591, 593-594, 599, 602, 666, 669-670, 703, 728, 750-753, 755, 757, 784, 786-788, 828-830, 972, 974-977, 1002, 1004-1005, 1009, 1011-1012, 1110-1111, 1126, 1172, 1176-1181, 1272-1274, 1297, 1302, 1387, 1392-1393, 1461-1463, 1474, 1482, 1498-1500, 1502, 1505, 1508, 1510-1511, 1514, 1516-1518, 1525-1526, 1529-1530, 1546-1547, 1572, 1597, 1721-1722, 1725-1727, 1745-1746, 1800-1801, 1824, 1832, 1835-1836, 1859, 1866, 1870-1872, 1878, 1880-1882, 1916, 1924, 1946, 1949, 2000-2001, 2066, 2090, 2163, 2169-2171, 2178, 2181, 2186, 2255-2256, 2307, 2321, 2333, 2394, 2403-2404, 2460-2462, 2489, 2491-2492, 2495, 2499, 2524-2525, 2527-2530, 2561, 2591, 2616, 2644, 2646, 2649-2651, 2653-2654, 2661-2664, 2684, 2693-2695, 2726-2728, 2777-2780, 2782, 2784-2785, 2791-2792, 2794-2795, 2797, 2849-2850, 2852, and 2917-2918. In some aspects, the oligonucleotide comprises the nucleobase sequence of any one of SEQ ID NOs: 160-161, 163-164, 166, 211-212, 230-231, 267-268, 282, 294, 322, 366-367, 391-394, 399, 514-515, 594, 602, 728, 750, 752-753, 755, 828, 830, 975-976, 1002, 1176-1179, 1274, 1387, 1462-1463, 1510, 1514, 1529-1530, 1726-1727, 1745-1746, 1824, 1871-1872, 2090, 2256, 2528-2530, 2644, and 2792. In some aspects, the oligonucleotide comprises the nucleobase sequence of any one of SEQ ID NOs: 164, 186-187, 212, 235, 322, 367-368, 379, 384-385, 388-389, 391-392, 395, 515, 594, 703, 751-753, 828-830, 1005, 1176-1180, 1274, 1297, 1302, 1387, 1393, 1463, 1511, 1514, 1745, 1824, 1881, 2256, 2404, 2491, 2528, 2530, and 2646. In some aspects, the oligonucleotide comprises the nucleobase sequence of any one of SEQ ID NOs: 174-176, 178, 180-187, 566-569, 573, 701-704, 1260-1261, 1274-1277, 1510-1513, 2000-2001, 2194, 2196, 2661-2664, and 2666.

[0125] In some aspects, the nucleobase sequence of the oligonucleotide consists of any one of SEQ ID NOs: 6-4710. In some aspects, the oligonucleotide consists of the nucleobase sequence of any one of SEQ ID NOs: 89, 92, 102, 107-108, 110-111, 115-116, 150, 154, 160-161, 163-164, 166, 168, 175-176, 178, 180, 182-183, 185-189, 201, 211-212, 229-231, 234-238, 241, 248-250, 254, 265-269, 282-283, 285-288, 294, 296, 319-322, 328-329, 366-367-368, 377-379, 381-399, 487-488, 511, 514-517, 520, 566-568, 573, 591, 593-594, 599, 602, 666, 669-670, 701-704, 728, 749-753, 755, 757, 784, 786-788, 790, 828-830, 959, 972, 974-977, 1002, 1004-1005, 1007, 1009-1013, 1086, 1110-1111, 1126, 1149, 1172, 1176-1181, 1185, 1260, 1271-1274, 1276-1277, 1297, 1302, 1387-1390, 1392-1393, 1396, 1461-1463, 1473-1474, 1482, 1490-1491, 1495, 1498-1502, 1505, 1508, 1510-1514, 1516-1518, 1525-1526, 1529-1530, 1546-1547, 1572, 1596-1597, 1721-1722, 1724-1725-1726-1727, 1744-1746, 1797, 1800-1802, 1824-1826, 1832, 1835-1836, 1859, 1865-1866, 1870-1873, 1875, 1878, 1880-1882, 1911, 1914-1918, 1924, 1945-1946, 1949, 2000-2001, 2035, 2064, 2066-2067, 2090-2091, 2163, 2166, 2169-2172, 2178, 2181, 2184, 2186, 2194, 2255-2256, 2307, 2321, 2333, 2343, 2345-2346, 2353-2355, 2394-2395, 2403-2404, 2460-2462, 2489-2492, 2495, 2499-2500, 2524-2530, 2561-2562, 2591, 2595, 2616, 2644-2651, 2653-2654, 2661-2664, 2674, 2683-2685, 2687, 2690-2691, 2693-2695, 2725-2728, 2777-2782, 2784-2785, 2789, 2791-2792, 2794-2795, 2797, 2848-2852, and 2917-2918. In some aspects, the oligonucleotide consists of the nucleobase sequence of any one of SEQ ID NOs: 89, 92, 102, 107-108, 111, 116, 150, 154, 160-161, 163-164, 166, 168, 175-176, 178, 180, 182-183, 185-189, 201, 211-212, 229-231, 234-236, 238, 241, 248-250, 254, 265-269, 282-283, 285-288, 294, 296, 319-320, 322, 328-329, 366-368, 377, 379, 381-399, 487-488, 511, 514-517, 520, 566-568, 573, 591, 593-594, 599, 602, 666, 669-670, 701-704, 728, 750-753, 755, 757, 784, 786-788, 790, 828-830, 972, 974-977, 1002, 1004-1005, 1009-1013, 1110-1111, 1126, 1172, 1176-1181, 1271-1274, 1276-1277, 1297, 1302, 1387, 1390, 1392-1393, 1461-1462-1463, 1474, 1482, 1490-1491, 1498-1502, 1505, 1508, 1510-1512, 1514, 1516-1518, 1525-1526, 1529-1530, 1546-1547, 1572, 1597, 1721-1722, 1724-1727, 1744-1746, 1797, 1800-1801, 1824-1826, 1832, 1835-1836, 1859, 1866, 1870-1873, 1878, 1880-1882, 1915-1917, 1924, 1945-1946, 1949, 2000-2001, 2035, 2064, 2066-2067, 2090, 2163, 2166, 2169-2172, 2178, 2181, 2184, 2186, 2194, 2255-2256, 2307, 2321, 2333, 2343, 2345, 2353, 2394-2395, 2403-2404, 2460-2462, 2489, 2491-2492, 2495, 2499, 2524-2525, 2527-2530, 2561-2562, 2591, 2595, 2616, 2644-2651, 2653-2654, 2661-2664, 2674, 2684, 2693-2695, 2725-2728, 2777-2782, 2784-2785, 2789, 2791-2792, 2794-2795, 2797, 2849-2852, and 2917-2918. In some aspects, the oligonucleotide consists of the nucleobase sequence of any one of SEQ ID NOs: 89, 102, 111, 116, 150, 154, 160-161, 163-164, 166, 168, 175-176, 178, 180, 183, 185-189, 201, 211-212, 229-231, 235-236, 238, 241, 250, 254, 265-269, 282-283, 286-288, 294, 296, 319, 322, 328, 366-368, 377, 379, 381-399, 511, 514-517, 567-568, 591, 593-594, 599, 602, 666, 669-670, 703, 728, 750-753, 755, 757, 784, 786-788, 828-830, 972, 974-977, 1002, 1004-1005, 1009, 1011-1012, 1110-1111, 1126, 1172, 1176-1181, 1272-1274, 1297, 1302, 1387, 1392-1393, 1461-1463, 1474, 1482, 1498-1500, 1502, 1505, 1508, 1510-1511, 1514, 1516-1518, 1525-1526, 1529-1530, 1546-1547, 1572, 1597, 1721-1722, 1725-1727, 1745-1746, 1800-1801, 1824, 1832, 1835-1836, 1859, 1866, 1870-1872, 1878, 1880-1882, 1916, 1924, 1946, 1949, 2000-2001, 2066, 2090, 2163, 2169-2171, 2178, 2181, 2186, 2255-2256, 2307, 2321, 2333, 2394, 2403-2404, 2460-2462, 2489, 2491-2492, 2495, 2499, 2524-2525, 2527-2530, 2561, 2591, 2616, 2644, 2646, 2649-2651, 2653-2654, 2661-2664, 2684, 2693-2695, 2726-2728, 2777-2780, 2782, 2784-2785, 2791-2792, 2794-2795, 2797, 2849-2850, 2852, and 2917-2918. In some aspects, the oligonucleotide consists of the nucleobase sequence of any one of SEQ ID NOs: 160-161, 163-164, 166, 211-212, 230-231, 267-268, 282, 294, 322, 366-367, 391-394, 399, 514-515, 594, 602, 728, 750, 752-753, 755, 828, 830, 975-976, 1002, 1176-1179, 1274, 1387, 1462-1463, 1510, 1514, 1529-1530, 1726-1727, 1745-1746, 1824, 1871-1872, 2090, 2256, 2528-2530, 2644, and 2792.

[0126] In some aspects, the oligonucleotide consists of the nucleobase sequence of any one of SEQ ID NOs: 164, 186-187, 212, 235, 322, 367-368, 379, 384-385, 388-389, 391-392, 395, 515, 594, 703, 751-753, 828-830, 1005, 1176-1180, 1274, 1297, 1302, 1387, 1393, 1463, 1511, 1514, 1745, 1824, 1881, 2256, 2404, 2491, 2528, 2530, and 2646. In some aspects, the oligonucleotide consists of the nucleobase sequence of any one of SEQ ID NOs: 174-176, 178, 180-187, 566-569, 573, 701-704, 1260-1261, 1274-1277, 1510-1513, 2000-2001, 2194, 2196, 2661-2664, and 2666. In some aspects,

[0127] In some aspects, the oligonucleotide exhibits at least 50% mRNA inhibition at 20 nM oligonucleotide concentration when determined using a cell assay when compared with a control cell. In some aspects, the oligonucleotide exhibits at least 60% mRNA inhibition at a 20 nM oligonucleotide concentration when determined using a cell assay when compared with a control cell. In some aspects, the oligonucleotide exhibits at least 70% mRNA inhibition at a 20 nM oligonucleotide concentration when determined using a cell assay when compared with a control cell. In some aspects, the oligonucleotide exhibits at least 85% mRNA inhibition at a 20 nM oligonucleotide concentration when determined using a cell assay when compared with a control cell. In some aspects, the oligonucleotide exhibits at least 50% mRNA inhibition at a 2 nM oligonucleotide concentration when determined using a cell assay when compared with a control cell. In some aspects, the oligonucleotide exhibits at least 60% mRNA inhibition at a 20 nM oligonucleotide concentration when determined using a cell assay when compared with a control cell. In some aspects, the oligonucleotide exhibits at least 70% mRNA inhibition at a 2 nM oligonucleotide concentration when determined using a cell assay when compared with a control cell. In some aspects, the oligonucleotide exhibits at least 85% mRNA inhibition at a 2 nM oligonucleotide concentration when determined using a cell assay when compared with a control cell.

[0128] The cell assay can comprise transfecting mammalian cells, such as HEK293, NIH3T3, or HeLa cells, with the desired concentration of oligonucleotide (e.g., 2 nM or 20 nM) using Lipofectamine 2000 (Invitrogen) and comparing MLH3 mRNA levels of transfected cells to MLH3 levels of control cells. Control cells can be transfected with oligonucleotides not specific to MLH3 or mock transfected. mRNA levels can be determined using RT-qPCR and MLH3 mRNA levels can be normalized to GAPDH mRNA levels. The percent inhibition can be calculated as the percent of MLH3 mRNA concentration relative to the MLH3 concentration of the control cells.

[0129] In some aspects, the oligonucleotide or contiguous nucleotide region thereof, has a gapmer design or structure also referred herein merely as “gapmer.” In a gapmer structure the oligonucleotide comprises at least three distinct structural regions a 5′-flanking sequence (also known as a 5′-wing), a DNA core sequence (also known as a gap) and a 3′-flanking sequence (also known as a 3′-wing), in ‘5->3’ orientation. In this design, the 5′ and 3′ flanking sequences comprise at least one alternative nucleoside which is adjacent to a DNA core sequence, and can in some aspects comprise a contiguous stretch of 2-7 alternative nucleosides, or a contiguous stretch of alternative and DNA nucleosides (mixed flanking sequences comprising both alternative and DNA nucleosides).

[0130] The length of the 5′-flanking sequence region can be at least two nucleosides in length (e.g., at least at least 2, at least 3, at least 4, at least 5, or more nucleosides in length). The length of the 3′-flanking sequence region can be at least two nucleosides in length (e.g., at least 2, at least 3, at least at least 4, at least 5, or more nucleosides in length). The 5′ and 3′ flanking sequences can be symmetrical or asymmetrical with respect to the number of nucleosides they comprise. In some aspects, the DNA core sequence comprises about 10 nucleosides flanked by a 5′ and a 3′ flanking sequence each comprising about 5 nucleosides, also referred to as a 5-10-5 gapmer.

[0131] Consequently, the nucleosides of the 5′ flanking sequence and the 3′ flanking sequence which are adjacent to the DNA core sequence are alternative nucleosides, such as 2′ alternative nucleosides. The DNA core sequence comprises a contiguous stretch of nucleotides which are capable of recruiting RNase H, when the oligonucleotide is in duplex with the MLH3 target nucleic acid. In some aspects, the DNA core sequence comprises a contiguous stretch of 5-16 DNA nucleosides. In other aspects, the DNA core sequence comprises a region of at least 10 contiguous nucleobases having at least 80% (e.g., at least 85%, at least 90%, at least 95%, or at least 99%) complementarity to a MLH3 gene. In some aspects, the gapmer comprises a region complementary to at least 17 contiguous nucleotides, 19-23 contiguous nucleotides, or 19 contiguous nucleotides of a MLH3 gene. The gapmer is complementary to the MLH3 target nucleic acid, and can therefore be the contiguous nucleoside region of the oligonucleotide.

[0132] The 5′ and 3′ flanking sequences, flanking the 5′ and 3′ ends of the DNA core sequence, can comprise one or more affinity enhancing alternative nucleosides. In some aspects, the 5′ and/or 3′ flanking sequence comprises at least one 2′-O-methoxyethyl (MOE) nucleoside. In some aspects, the 5′ and/or 3′ flanking sequences, contain at least two MOE nucleosides. In some aspects, the 5′ flanking sequence comprises at least one MOE nucleoside. In some aspects, both the 5′ and 3′ flanking sequence comprise a MOE nucleoside. In some aspects, all the nucleosides in the flanking sequences are MOE nucleosides. In other aspects, the flanking sequence can comprise both MOE nucleosides and other nucleosides (mixed flanking sequence), such as DNA nucleosides and/or non-MOE alternative nucleosides, such as bicyclic nucleosides (BNAs) (e.g., LNA nucleosides or cET nucleosides), or other 2′ substituted nucleosides. In this case the DNA core sequence is defined as a contiguous sequence of at least 5 RNase H recruiting nucleosides (such as 5-16 DNA nucleosides) flanked at the 5′ and 3′ end by an affinity enhancing alternative nucleoside, such as an MOE nucleoside.

[0133] In other aspects, the 5′ and/or 3′ flanking sequence comprises at least one BNA (e.g., at least one LNA nucleoside or cET nucleoside). In some aspects, 5′ and/or 3′ flanking sequence comprises at least 2 bicyclic nucleosides. In some aspects, the 5′ flanking sequence comprises at least one BNA. In some aspects, both the 5′ and 3′ flanking sequence comprise a BNA. In some aspects, all the nucleosides in the flanking sequences are BNAs. In other aspects, the flanking sequence can comprise both BNAs and other nucleosides (mixed flanking sequences), such as DNA nucleosides and/or non-BNA alternative nucleosides, such as 2′ substituted nucleosides. In this case the DNA core sequence is defined as a contiguous sequence of at least five RNase H recruiting nucleosides (such as 5-16 DNA nucleosides) flanked at the 5′ and 3′ end by an affinity enhancing alternative nucleoside, such as a BNA, such as an LNA, such as beta-D-oxy-LNA.

[0134] The 5′ flank attached to the 5′ end of the DNA core sequence comprises, contains, or consists of at least one alternative sugar moiety (e.g., at least three, at least four, at least five, at least six, at least seven, or more alternative sugar moieties). In some aspects, the flanking sequence comprises or consists of from 1 to 7 alternative nucleobases, such as from 2 to 6 alternative nucleobases, such as from 2 to 5 alternative nucleobases, such as from 2 to 4 alternative nucleobases, such as from 1 to 3 alternative nucleobases, such as one, two, three or four alternative nucleobases. In some aspects, the flanking sequence comprises or consists of at least one alternative internucleoside linkage (e.g., at least three, at least four, at least five, at least six, at least seven, or more alternative internucleoside linkages).

[0135] The 3′ flank attached to the 3′ end of the DNA core sequence comprises, contains, or consists of at least one alternative sugar moiety (e.g., at least three, at least four, at least five, at least six, at least seven, or more alternative sugar moieties). In some aspects, the flanking sequence comprises or consists of from 1 to 7 alternative nucleobases, such as from 2 to 6 alternative nucleobases, such as from 2 to 5 alternative nucleobases, such as from 2 to 4 alternative nucleobases, such as from 1 to 3 alternative nucleobases, such as one, two, three, or four alternative nucleobases. In some aspects, the flanking sequence comprises or consists of at least one alternative internucleoside linkage (e.g., at least three, at least four, at least five, at least six, at least seven, or more alternative internucleoside linkages).

[0136] In an aspect, one or more or all of the alternative sugar moieties in the flanking sequence are 2′ alternative sugar moieties.

[0137] In a further aspect, one or more of the 2′ alternative sugar moieties in the wing regions are selected from 2′-O-alkyl-sugar moieties, 2′-O-methyl-sugar moieties, 2′-amino-sugar moieties, 2′-fluoro-sugar moieties, 2′-alkoxy-sugar moieties, MOE sugar moieties, LNA sugar moieties, arabino nucleic acid (ANA) sugar moieties, and 2′-fluoro-ANA sugar moieties.

[0138] In one aspect, all the alternative nucleosides in the flanking sequences are bicyclic nucleosides. In a further aspect, the bicyclic nucleosides in the flanking sequences are independently selected from the group consisting of oxy-LNA, thio-LNA, amino-LNA, cET, and/or ENA, in either the beta-D or alpha-L configurations or combinations thereof.

[0139] In some aspects, the one or more alternative internucleoside linkages in the flanking sequences are phosphorothioate internucleoside linkages. In some aspects, the phosphorothioate linkages are stereochemically pure phosphorothioate linkages. In some aspects, the phosphorothioate linkages are Sp phosphorothioate linkages. In other aspects, the phosphorothioate linkages are Rp phosphorothioate linkages. In some aspects, the alternative internucleoside linkages are 2′-alkoxy internucleoside linkages. In other aspects, the alternative internucleoside linkages are alkyl phosphate internucleoside linkages.

[0140] The DNA core sequence can comprise, contain, or consist of at least 5-16 consecutive DNA nucleosides capable of recruiting RNase H. In some aspects, all of the nucleosides of the DNA core sequence are DNA units. In further aspects, the DNA core region can consist of a mixture of DNA and other nucleosides capable of mediating RNase H cleavage. In some aspects, at least 50% of the nucleosides of the DNA core sequence are DNA, such as at least 60%, at least 70% or at least 80%, or at least 90% DNA. In some aspects, all of the nucelosides of the DNA core sequence are RNA units.

[0141] The oligonucleotide comprises a contiguous region which is complementary to the target nucleic acid. In some aspects, the oligonucleotide can further comprise additional linked nucleosides positioned 5′ and/or 3′ to either the 5′ and 3′ flanking sequences. These additional linked nucleosides can be attached to the 5′ end of the 5′ flanking sequence or the 3′ end of the 3′ flanking sequence, respectively. The additional nucleosides can, in some aspects, form part of the contiguous sequence which is complementary to the target nucleic acid, or in other aspects, can be non-complementary to the target nucleic acid.

[0142] The inclusion of the additional nucleosides at either, or both of the 5′ and 3′ flanking sequences can independently comprise one, two, three, four, or five additional nucleotides, which can be complementary or non-complementary to the target nucleic acid. In this respect, the oligonucleotide can, in some aspects, comprise a contiguous sequence capable of modulating the target which is flanked at the 5′ and/or 3′ end by additional nucleotides. Such additional nucleosides can serve as a nuclease susceptible biocleavable linker, and can therefore be used to attach a functional group such as a conjugate moiety to the oligonucleotide. In some aspects, the additional 5′ and/or 3′ end nucleosides are linked with phosphodiester linkages, and can be DNA or RNA. In another aspect, the additional 5′ and/or 3′ end nucleosides are alternative nucleosides which can for example be included to enhance nuclease stability or for ease of synthesis.

[0143] In other aspects, the oligonucleotides utilize “altimer” design and comprise alternating 2′-fluoro-ANA and DNA regions that are alternated every three nucleosides. Altimer oligonucleotides are discussed in more detail in Min, et al., Bioorganic & Medicinal Chemistry Letters, 2002, 12(18): 2651-2654 and Kalota, et al., Nuc. Acid Res. 2006, 34(2): 451-61 (herein incorporated by reference).

[0144] In other aspects, the oligonucleotides utilize “hemimer” design and comprise a single 2′-modified flanking sequence adjacent to (on either side of the 5′ or the 3′ side of) a DNA core sequence. Hemimer oligonucleotides are discussed in more detail in Geary et al., 2001, J. Pharm. Exp. Therap., 296: 898-904 (herein incorporated by reference).

[0145] In some aspects, an oligonucleotide has a nucleic acid sequence with at least 50% (e.g., at least 50%, at least 60%, at least 70%, at least 80%, at least 85%, at least 90%, at least 95%, at least 96%, at least 97%, at least 98%, at least 99%, or 100%) sequence identity to the nucleic acid sequence of any one of SEQ ID NOs: 6-4710. In some aspects, an oligonucleotide has a nucleic acid sequence with at least 85% sequence identity to the nucleic acid sequence of any one of SEQ ID NOs: 6-4710.

[0146] It will be understood that, although the sequences in SEQ ID NOs: 6-4710 are described as unmodified and/or un-conjugated sequences, the nucleosides of the oligonucleotide can comprise any one of the sequences set forth in any one of SEQ ID NOs: 6-4710 that is an alternative nucleoside and/or conjugated as described in detail below.

[0147] The skilled person is well aware that oligonucleotides having a structure of between about 18-20 base pairs can be particularly effective in inducing RNase H-mediated degradation. However, one can appreciate that shorter or longer oligonucleotides can be effective. In the aspects described above, by virtue of the nature of the oligonucleotide sequences provided herein, oligonucleotides described herein can include shorter or longer oligonucleotide sequences. It can be reasonably expected that shorter oligonucleotides minus only a few linked nucleosides on one or both ends can be similarly effective as compared to the oligonucleotides described above. Hence, oligonucleotides having a sequence of at least 8, 9, 10, 11, 12, 13, 14, 15, 16, 17, 18, 19, 20, or more contiguous linked nucleosides derived from one of the sequences provided herein, and differing in their ability to inhibit the expression of a MLH3 gene by not more than about 5, 10, 15, 20, 25, or 30% inhibition from an oligonucleotide comprising the full sequence, are contemplated to be within the scope.

[0148] The oligonucleotides described herein can function via nuclease mediated degradation of the target nucleic acid, where the oligonucleotides are capable of recruiting a nuclease, such as an endonuclease like endoribonuclease (RNase) (e.g., RNase H). Examples of oligonucleotide designs which operate via nuclease mediated mechanisms are oligonucleotides which typically comprise a region of at least 5 or 6 DNA nucleosides and are flanked on one side or both sides by affinity enhancing alternative nucleosides, for example gapmers, headmers, and tailmers.

[0149] The RNase H activity of an oligonucleotide refers to its ability to recruit RNase H when in a duplex with a complementary RNA molecule. WO01/23613 provides in vitro methods for determining RNase H activity, which can be used to determine the ability to recruit RNase H. Typically an oligonucleotide is deemed capable of recruiting RNase H if it, when provided with a complementary target nucleic acid sequence, has an initial rate, as measured in pmol/l/min, of at least 5%, such as at least 10% or more than 20% of the of the initial rate determined when using an oligonucleotide having the same base sequence as the modified oligonucleotide being tested, but containing only DNA monomers, with phosphorothioate linkages between all monomers in the oligonucleotide, and using the methodology provided by Example 91-95 of WO01/23613 (hereby incorporated by reference).

[0150] Furthermore, the oligonucleotides described herein identify a site(s) in a MLH3 transcript that is susceptible to RNase H-mediated cleavage. As used herein, an oligonucleotide is said to target within a particular site of an RNA transcript if the oligonucleotide promotes cleavage of the transcript anywhere within that particular site. Such an oligonucleotide will generally include at least about 5-10 contiguous linked nucleosides from one of the sequences provided herein coupled to additional linked nucleoside sequences taken from the region contiguous to the selected sequence in a MLH3 gene.

[0151] Inhibitory oligonucleotides can be designed by methods well known in the art. While a target sequence is generally about 10-30 linked nucleosides in length, there is wide variation in the suitability of particular sequences in this range for directing cleavage of any given target RNA.

[0152] Oligonucleotides with homology sufficient to provide sequence specificity required to uniquely degrade any RNA can be designed using programs known in the art

[0153] Systematic testing of several designed species for optimization of the inhibitory oligonucleotide sequence can be undertaken in accordance with the teachings provided herein. Considerations when designing interfering oligonucleotides include, but are not limited to, biophysical, thermodynamic, and structural considerations, base preferences at specific positions, and homology. The making and use of inhibitory therapeutic agents based on non-coding oligonucleotides are also known in the art.

[0154] Various software packages and the guidelines set out herein provide guidance for the identification of optimal target sequences for any given gene target, but an empirical approach can be taken in which a “window” or “mask” of a given size (as a non-limiting example, 21 nucleotides) is literally or figuratively (including, e.g., in silico) placed on the target RNA sequence to identify sequences in the size range that can serve as target sequences. By moving the sequence “window” progressively one nucleotide upstream or downstream of an initial target sequence location, the next potential target sequence can be identified, until the complete set of possible sequences is identified for any given target size selected. This process, coupled with systematic synthesis and testing of the identified sequences (using assays as described herein or as known in the art) to identify those sequences that perform optimally can identify those RNA sequences that, when targeted with an oligonucleotide agent, mediate the best inhibition of target gene expression. Thus, while the sequences identified herein represent effective target sequences, it is contemplated that further optimization of inhibition efficiency can be achieved by progressively “walking the window” one nucleotide upstream or downstream of the given sequences to identify sequences with equal or better inhibition characteristics.

[0155] Further, it is contemplated that for any sequence identified herein, further optimization could be achieved by systematically either adding or removing linked nucleosides to generate longer or shorter sequences and testing those sequences generated by walking a window of the longer or shorter size up or down the target RNA from that point. Again, coupling this approach to generating new candidate targets with testing for effectiveness of oligonucleotides based on those target sequences in an inhibition assay as known in the art and/or as described herein can lead to further improvements in the efficiency of inhibition.

[0156] Further still, such optimized sequences can be adjusted by, e.g., the introduction of alternative nucleosides, alternative sugar moieties, and/or alternative internucleosidic linkages as described herein or as known in the art, including alternative nucleosides, alternative sugar moieties, and/or alternative internucleosidic linkages as known in the art and/or discussed herein to further optimize the molecule (e.g., increasing serum stability or circulating half-life, increasing thermal stability, enhancing transmembrane delivery, targeting to a particular location or cell type, increasing interaction with silencing pathway enzymes, increasing release from endosomes) as an expression inhibitor. An oligonucleotide agent as described herein can contain one or more mismatches to the target sequence. In one aspect, an oligonucleotide as described herein contains no more than 3 mismatches. If the oligonucleotide contains mismatches to a target sequence, in some aspects, the area of mismatch is not located in the center of the region of complementarity. If the oligonucleotide contains mismatches to the target sequence, in some aspects, the mismatch should be restricted to be within the last 5 nucleotides from either the 5′- or 3′-end of the region of complementarity. For example, for a 30-linked nucleoside oligonucleotide agent, the contiguous nucleobase region which is complementary to a region of a MLH3 gene, generally does not contain any mismatch within the central 5-10 linked nucleosides. The methods described herein or methods known in the art can be used to determine whether an oligonucleotide containing a mismatch to a target sequence is effective in inhibiting the expression of a MLH3 gene. Consideration of the efficacy of oligonucleotides with mismatches in inhibiting expression of a MLH3 gene is important, especially if the particular region of complementarity in a MLH3 gene is known to have polymorphic sequence variation within the population.

[0157] Construction of vectors for expression of polynucleotides for use can be accomplished using conventional techniques which do not require detailed explanation to one of ordinary skill in the art. For generation of efficient expression vectors, it is necessary to have regulatory sequences that control the expression of the polynucleotide. These regulatory sequences include promoter and enhancer sequences and are influenced by specific cellular factors that interact with these sequences, and are well known in the art.

[0158] A. Alternative Oligonucleosides

[0159] In one aspect, one or more of the linked nucleosides or internucleosidic linkages of the oligonucleotide, is naturally occurring, and does not comprise, e.g., chemical modifications and/or conjugations known in the art and described herein. In another aspect, one or more of the linked nucleosides or internucleosidic linkages of an oligonucleotide described herein, is chemically modified to enhance stability or other beneficial characteristics. Without being bound by theory, it is believed that certain modifications can increase nuclease resistance and/or serum stability, or decrease immunogenicity. For example, oligonucleotides can contain nucleotides found to occur naturally in DNA or RNA (e.g., adenine, thymidine, guanosine, cytidine, uridine, or inosine) or can contain alternative nucleosides or internucleosidic linkages which have one or more chemical modifications to one or more components of the nucleotide (e.g., the nucleobase, sugar, or phospho-linker moiety). Oligonucleotides can be linked to one another through naturally occurring phosphodiester bonds, or can contain alternative linkages (e.g., covalently linked through phosphorothioate (e.g., Sp phosphorothioate or Rp phosphorothioate), 3′-methylenephosphonate, 5′-methylenephosphonate, 3′-phosphoamidate, 2′-5′ phosphodiester, guanidinium, S-methylthiourea, 2′-alkoxy, alkyl phosphate, or peptide bonds).

[0160] In some aspects, substantially all of the nucleosides or internucleosidic linkages of an oligonucleotide are alternative nucleosides. In other aspects, all of the nucleosides or internucleosidic linkages of an oligonucleotide described herein are alternative nucleosides. Oligonucleotides in which “substantially all of the nucleosides are alternative nucleosides” are largely but not wholly modified and can include not more than five, four, three, two, or one naturally-occurring nucleosides. In still other aspects, oligonucleotides can include not more than five, four, three, two, or one alternative nucleosides.

[0161] The nucleic acids can be synthesized and/or modified by methods well established in the art, such as those described in “Current protocols in nucleic acid chemistry,” Beaucage, S. L. et al. (Edrs.), John Wiley & Sons, Inc., New York, N.Y., USA, which is hereby incorporated herein by reference. Alternative nucleotides and nucleosides include those with modifications including, for example, end modifications, e.g., 5′-end modifications (phosphorylation, conjugation, inverted linkages) or 3′-end modifications (conjugation, DNA nucleotides, inverted linkages, etc.); base modifications, e.g., replacement with stabilizing bases, destabilizing bases, or bases that base pair with an expanded repertoire of partners, removal of bases (abasic nucleotides), or conjugated bases; sugar modifications (e.g., at the 2′-position or 4′-position) or replacement of the sugar; and/or backbone modifications, including modification or replacement of the phosphodiester linkages. The nucleobase can be an isonucleoside in which the nucleobase is moved from the C1 position of the sugar moiety to a different position (e.g. C2, C3, C4, or C5). Specific examples of oligonucleotide compounds useful in the aspects described herein include, but are not limited to alternative nucleosides containing modified backbones or no natural internucleoside linkages. Nucleotides and nucleosides having modified backbones include, among others, those that do not have a phosphorus atom in the backbone. For the purposes of this specification, and as sometimes referenced in the art, alternative RNAs that do not have a phosphorus atom in their internucleoside backbone can be considered to be oligonucleosides. In some aspects, an oligonucleotide will have a phosphorus atom in its internucleoside backbone.

[0162] Alternative internucleoside linkages include, for example, phosphorothioates, chiral phosphorothioates, phosphorodithioates, phosphotriesters, aminoalkylphosphotriesters, methyl and other alkyl phosphonates including 3′-alkylene phosphonates and chiral phosphonates, phosphinates, phosphoramidates including 3′-amino phosphoramidate and aminoalkylphosphoramidates, thionophosphoramidates, thionoalkylphosphonates, thionoalkylphosphotriesters, and boronophosphates having normal 3′-5′ linkages, 2′-5′-linked analogs of these, and those having inverted polarity wherein the adjacent pairs of nucleoside units are linked 3′-5′ to 5′-3′ or 2′-5′ to 5′-2′. Various salts, mixed salts, and free acid forms are also included.

[0163] Representative U.S. patents that teach the preparation of the above phosphorus-containing linkages include, but are not limited to, U.S. Pat. Nos. 3,687,808; 4,469,863; 4,476,301; 5,023,243; 5,177,195; 5,188,897; 5,264,423; 5,276,019; 5,278,302; 5,286,717; 5,321,131; 5,399,676; 5,405,939; 5,453,496; 5,455,233; 5,466,677; 5,476,925; 5,519,126; 5,536,821; 5,541,316; 5,550,111; 5,563,253; 5,571,799; 5,587,361; 5,625,050; 6,028,188; 6,124,445; 6,160,109; 6,169,170; 6,172,209; 6,239,265; 6,277,603; 6,326,199; 6,346,614; 6,444,423; 6,531,590; 6,534,639; 6,608,035; 6,683,167; 6,858,715; 6,867,294; 6,878,805; 7,015,315; 7,041,816; 7,273,933; 7,321,029; and U.S. Pat. RE39464, the entire contents of each of which are hereby incorporated herein by reference.

[0164] Alternative internucleoside linkages that do not include a phosphorus atom therein have backbones that are formed by short chain alkyl or cycloalkyl internucleoside linkages, mixed heteroatoms and alkyl or cycloalkyl internucleoside linkages, or one or more short chain heteroatomic or heterocyclic internucleoside linkages. These include those having morpholino linkages (formed in part from the sugar portion of a nucleoside); siloxane backbones; sulfide, sulfoxide and sulfone backbones; formacetyl and thioformacetyl backbones; methylene formacetyl and thioformacetyl backbones; alkene containing backbones; sulfamate backbones; methyleneimino and methylenehydrazino backbones; sulfonate and sulfonamide backbones; amide backbones; and others having mixed N, O, S, and CH₂ component parts.

[0165] Representative U.S. patents that teach the preparation of the above oligonucleosides include, but are not limited to, U.S. Pat. Nos. 5,034,506; 5,166,315; 5,185,444; 5,214,134; 5,216,141; 5,235,033; 5,64,562; 5,264,564; 5,405,938; 5,434,257; 5,466,677; 5,470,967; 5,489,677; 5,541,307; 5,561,225; 5,596,086; 5,602,240; 5,608,046; 5,610,289; 5,618,704; 5,623,070; 5,663,312; 5,633,360; 5,677,437; and, 5,677,439, the entire contents of each of which are hereby incorporated herein by reference.

[0166] In other aspects, suitable oligonucleotides include those in which both the sugar and the internucleoside linkage, i.e., the backbone, of the nucleotide units are replaced. The base units are maintained for hybridization with an appropriate nucleic acid target compound. One such oligomeric compound, a mimetic that has been shown to have excellent hybridization properties, is referred to as a peptide nucleic acid (PNA). In PNA compounds, the sugar of a nucleoside is replaced with an amide containing backbone, in particular an aminoethylglycine backbone. The nucleobases are retained and are bound directly or indirectly to aza nitrogen atoms of the amide portion of the backbone. Representative U.S. patents that teach the preparation of PNA compounds include, but are not limited to, U.S. Pat. Nos. 5,539,082; 5,714,331; and 5,719,262, the entire contents of each of which are hereby incorporated herein by reference. Additional PNA compounds suitable for use in the oligonucleotides are described in, for example, in Nielsen et al., Science, 1991, 254, 1497-1500.

[0167] Some aspects include oligonucleotides with phosphorothioate backbones and oligonucleotides with heteroatom backbones, and in particular —CH₂—NH—CH₂—, —CH₂—N(CH₃)—O—CH₂-[known as a methylene (methylimino) or MMI backbone], —CH₂—O—N(CH₃)—CH₂—, —CH₂—N(CH₃)—N(CH₃)—CH₂— and —N(CH₃)—CH₂—CH₂-[wherein the native phosphodiester backbone is represented as —O—P—O—CH₂-] of the above-referenced U.S. Pat. No. 5,489,677, and the amide backbones of the above-referenced U.S. Pat. No. 5,602,240. In some aspects, the oligonucleotides featured herein have morpholino backbone structures of the above-referenced U.S. Pat. No. 5,034,506. In other aspects, the oligonucleotides described herein include phosphorodiamidate morpholino oligomers (PMO), in which the deoxyribose moiety is replaced by a morpholine ring, and the charged phosphodiester inter-subunit linkage is replaced by an uncharged phophorodiamidate linkage, as described in Summerton, et al., Antisense Nucleic Acid Drug Dev. 1997, 7:63-70.

[0168] Alternative nucleosides and nucleotides can contain one or more substituted sugar moieties. The oligonucleotides, e.g., oligonucleotides, featured herein can include one of the following at the 2′-position: OH; F; O-, S-, or N-alkyl; O-, S-, or N-alkenyl; S- or N-alkynyl; or O-alkyl-O-alkyl, wherein the alkyl, alkenyl and alkynyl can be substituted or unsubstituted C₁ to C₁₀ alkyl or C₂ to C₁₀ alkenyl and alkynyl. Exemplary suitable modifications include —O[(CH₂)ₙO]ₘCH₃, —O(CH₂)ₙOCH₃, —O(CH₂)ₙ—NH₂, —O(CH₂)ₙCH₃, —O(CH₂)ₙ—ONH₂, and —O(CH₂)ₙ—ON[(CH₂)ₙCH₃]₂, where n and m are from 1 to about 10. In other aspects, oligonucleotides include one of the following at the 2′ position: C₁ to C₁₀ lower alkyl, substituted lower alkyl, alkaryl, aralkyl, O-alkaryl or O-aralkyl, SH, SCH₃, OCN, Cl, Br, CN, CF₃, OCF₃, SOCH₃, SO₂CH₃, ONO₂, NO₂, N₃, NH₂, heterocycloalkyl, heterocycloalkaryl, aminoalkylamino, polyalkylamino, substituted silyl, an RNA cleaving group, a reporter group, an intercalator, a group for improving the pharmacokinetic properties of an oligonucleotide, or a group for improving the pharmacodynamic properties of an oligonucleotide, and other substituents having similar properties. In some aspects, the modification includes a 2′-methoxyethoxy (2′-O—CH₂CH₂OCH₃, also known as 2′-O-(2-methoxyethyl) or 2′-MOE) (Martin et al., Helv. Chin. Acta, 1995, 78:486-504) i.e., an alkoxy-alkoxy group. MOE nucleosides confer several beneficial properties to oligonucleotides including, but not limited to, increased nuclease resistance, improved pharmacokinetics properties, reduced non-specific protein binding, reduced toxicity, reduced immunostimulatory properties, and enhanced target affinity as compared to unmodified oligonucleotides.

[0169] Another exemplary alternative contains 2′-dimethylaminooxyethoxy, i.e., a —O(CH₂)₂ON(CH₃)₂ group, also known as 2′-DMAOE, as described in examples herein below, and 2′-dimethylaminoethoxyethoxy (also known in the art as 2′-O-dimethylaminoethoxyethyl or 2′-DMAEOE), i.e., 2′-O—(CH₂)₂—O—(CH₂)₂—N(CH₃)₂. Further exemplary alternatives include: 5′-Me-2′-F nucleotides, 5′-Me-2′-OMe nucleotides, 5′-Me-2′-deoxynucleotides, (both R and S isomers in these three families); 2′-alkoxyalkyl; and 2′-NMA (N-methylacetamide).

[0170] Other alternatives include 2′-methoxy (2′-OCH₃), 2′-aminopropoxy (2′-OCH₂CH₂CH₂NH₂) and 2′-fluoro (2′-F). Similar modifications can also be made at other positions on the nucleosides and nucleotides of an oligonucleotide, particularly the 3′ position of the sugar on the 3′ terminal nucleotide or in 2′-5′ linked oligonucleotides and the 5′ position of 5′ terminal nucleotide. Oligonucleotides can have sugar mimetics such as cyclobutyl moieties in place of the pentofuranosyl sugar. Representative U.S. patents that teach the preparation of such modified sugar structures include, but are not limited to, U.S. Pat. Nos. 4,981,957; 5,118,800; 5,319,080; 5,359,044; 5,393,878; 5,446,137; 5,466,786; 5,514,785; 5,519,134; 5,567,811; 5,576,427; 5,591,722; 5,597,909; 5,610,300; 5,627,053; 5,639,873; 5,646,265; 5,658,873; 5,670,633; and 5,700,920, certain of which are commonly owned with the instant application. The entire contents of each of the foregoing are hereby incorporated herein by reference.

[0171] An oligonucleotide can include nucleobase (often referred to in the art simply as “base”) alternatives (e.g., modifications or substitutions). Unmodified or natural nucleobases include the purine bases adenine (A) and guanine (G), and the pyrimidine bases thymine (T), cytosine (C) and uracil (U). Alternative nucleobases include other synthetic and natural nucleobases such as 5-methylcytidine, 5-hydroxymethylcytidine, 5-formylcytidine, 5-carboxycytidine, pyrrolocytidine, dideoxycytidine, uridine, 5-methoxyuridine, 5-hydroxydeoxyuridine, dihydrouridine, 4-thiourdine, pseudouridine, 1-methyl-pseudouridine, deoxyuridine, 5-hydroxybutynl-2′-deoxyuridine, xanthine, hypoxanthine, 7-deaza-xanthine, thienoguanine, 8-aza-7-deazaguanosine, 7-methylguanosine, 7-deazaguanosine, 6-aminomethyl-7-deazaguanosine, 8-aminoguanine, 2,2,7-trimethylguanosine, 8-methyladenine, 8-azidoadenine, 7-methyladenine, 7-deazaadenine, 3-deazaadenine, 2,6-diaminopurine, 2-aminopurine, 7-deaza-8-aza-adenine, 8-amino-adenine, thymine, dideoxythymine, 5-nitroindole, 2-aminoadenine, 6-methyl and other alkyl derivatives of adenine and guanine, 2-propyl and other alkyl derivatives of adenine and guanine, 2-thiouridine, 2-thiothymine and 2-thiocytosine, 5-halouracil and cytosine, 5-propynyl uridine and cytidine, 6-azo uridine, cytidine and thymine, 4-thiouridine, 8-halo, 8-amino, 8-thiol, 8-thioalkyl, 8-hydroxyl anal other 8-substituted adenines and guanines, 5-halo, particularly 5-bromo, 5-trifluoromethyl and other 5-substituted uridines and cytidines, 8-azaguanine and 8-azaadenine, and 3-deazaguanine. Further nucleobases include those disclosed in U.S. Pat. No. 3,687,808, those disclosed in Modified Nucleosides in Biochemistry, Biotechnology and Medicine, Herdewijn, P. ed. Wiley-VCH, 2008; those disclosed in The Concise Encyclopedia Of Polymer Science And Engineering, pages 858-859, Kroschwitz, J. L, ed. John Wiley & Sons, 1990, these disclosed by Englisch et al., (1991) Angewandte Chemie, International Edition, 30:613, and those disclosed by Sanghvi, Y S., Chapter 15, Antisense Research and Applications, pages 289-302, Crooke, S. T. and Lebleu, B., Ed., CRC Press, 1993. Certain of these nucleobases are particularly useful for increasing the binding affinity of the oligonucleotides. These include 5-substituted pyrimidines, 6-azapyrimidines, and N-2, N-6 and 0-6 substituted purines, including 2-aminopropyladenine, 5-propynyluracil, and 5-propynylcytosine. 5-methylcytosine substitutions have been shown to increase nucleic acid duplex stability by 0.6-1.2° C. (Sanghvi, Y. S., Crooke, S. T. and Lebleu, B., Eds., Antisense Research and Applications, CRC Press, Boca Raton, 1993, pp. 276-278) and are exemplary base substitutions, even more particularly when combined with 2′-O-methoxyethyl sugar modifications.

[0172] Representative U.S. patents that teach the preparation of certain of the above noted alternative nucleobases as well as other alternative nucleobases include, but are not limited to, the above noted U.S. Pat. Nos. 3,687,808, 4,845,205; 5,130,30; 5,134,066; 5,175,273; 5,367,066; 5,432,272; 5,457,187; 5,459,255; 5,484,908; 5,502,177; 5,525,711; 5,552,540; 5,587,469; 5,594,121, 5,596,091; 5,614,617; 5,681,941; 5,750,692; 6,015,886; 6,147,200; 6,166,197; 6,222,025; 6,235,887; 6,380,368; 6,528,640; 6,639,062; 6,617,438; 7,045,610; 7,427,672; and 7,495,088, the entire contents of each of which are hereby incorporated herein by reference.

[0173] In other aspects, the sugar moiety in the nucleotide can be a ribose molecule, optionally having a 2′-O-methyl, 2′-O-MOE, 2′-F, 2′-amino, 2′-O-propyl, 2′-aminopropyl, or 2′-OH modification.

[0174] An oligonucleotide can include one or more bicyclic sugar moieties. A “bicyclic sugar” is a furanosyl ring modified by the bridging of two atoms. A “bicyclic nucleoside” (“BNA”) is a nucleoside having a sugar moiety comprising a bridge connecting two carbon atoms of the sugar ring, thereby forming a bicyclic ring system. In some aspects, the bridge connects the 4′-carbon and the 2′-carbon of the sugar ring. Thus, in some aspects, an oligonucleotide can include one or more locked nucleosides. A locked nucleoside is a nucleoside having a modified ribose moiety in which the ribose moiety comprises an extra bridge connecting the 2′ and 4′ carbons. In other words, a locked nucleoside is a nucleoside comprising a bicyclic sugar moiety comprising a 4′-CH₂—O-2′ bridge. This structure effectively “locks” the ribose in the 3′-endo structural conformation. The addition of locked nucleosides to oligonucleotides has been shown to increase oligonucleotide stability in serum, and to reduce off-target effects (Grunweller, A. et al., (2003) Nucleic Acids Research 31(12):3185-3193). Examples of bicyclic nucleosides for use in the polynucleotides include without limitation nucleosides comprising a bridge between the 4′ and the 2′ ribosyl ring atoms. In some aspects, the polynucleotide agents include one or more bicyclic nucleosides comprising a 4′ to 2′ bridge. Examples of such 4′ to 2′ bridged bicyclic nucleosides, include but are not limited to 4′-(CH₂)—O-2′ (LNA); 4′-(CH₂)—S-2′; 4′-(CH₂)₂—O-2′ (ENA); 4′-CH(CH₃)—O-2′ (also referred to as “constrained ethyl” or “cEt”) and 4′-CH(CH₂OCH₃)—O-2′ (and analogs thereof; see, e.g., U.S. Pat. No. 7,399,845); 4′-C(CH₃)(CH₃)—O-2′ (and analogs thereof; see e.g., U.S. Pat. No. 8,278,283); 4′-CH₂—N(OCH₃)-2′ (and analogs thereof; see e.g., U.S. Pat. No. 8,278,425); 4′-CH₂—O—N(CH₃)₂-2′ (see, e.g., U.S. Patent Publication No. 2004/0171570); 4′-CH₂—N(R)—O-2′, wherein R is H, C₁-C₁₂ alkyl, or a protecting group (see, e.g., U.S. Pat. No. 7,427,672); 4′-CH₂—C(H)(CH₃)-2′ (see, e.g., Chattopadhyaya et al., J. Org. Chem., 2009, 74, 118-134); and 4′-CH₂—C(═CH₂)-2′ (and analogs thereof; see, e.g., U.S. Pat. No. 8,278,426). The entire contents of each of the foregoing are hereby incorporated herein by reference.

[0175] Additional representative U.S. Patents and US Patent Publications that teach the preparation of locked nucleic acid nucleotides include, but are not limited to, the following: U.S. Pat. Nos. 6,268,490; 6,525,191; 6,670,461; 6,770,748; 6,794,499; 6,998,484; 7,053,207; 7,034,133; 7,084,125; 7,399,845; 7,427,672; 7,569,686; 7,741,457; 8,022,193; 8,030,467; 8,278,425; 8,278,426; 8,278,283; US 2008/0039618; and US 2009/0012281, the entire contents of each of which are hereby incorporated herein by reference.

[0176] Any of the foregoing bicyclic nucleosides can be prepared having one or more stereochemical sugar configurations including for example α-L-ribofuranose and β-D-ribofuranose (see WO 99/14226).

[0177] An oligonucleotide can be modified to include one or more constrained ethyl nucleosides. As used herein, a “constrained ethyl nucleoside” or “cEt” is a locked nucleoside comprising a bicyclic sugar moiety comprising a 4′-CH(CH₃)—O-2′ bridge. In one aspect, a constrained ethyl nucleoside is in the S conformation referred to herein as “S-cEt.”

[0178] An oligonucleotide can include one or more “conformationally restricted nucleosides” (“CRN”). CRN are nucleoside analogs with a linker connecting the C2′ and C4′ carbons of ribose or the C3 and —C5′ carbons of ribose. CRN lock the ribose ring into a stable conformation and increase the hybridization affinity to mRNA. The linker is of sufficient length to place the oxygen in an optimal position for stability and affinity resulting in less ribose ring puckering.

[0179] Representative publications that teach the preparation of certain of the above noted CRN include, but are not limited to, US Patent Publication No. 2013/0190383; and PCT publication WO 2013/036868, the entire contents of each of which are hereby incorporated herein by reference.

[0180] In some aspects, an oligonucleotide comprises one or more monomers that are UNA (unlocked nucleoside) nucleosides. UNA is unlocked acyclic nucleoside, wherein any of the bonds of the sugar has been removed, forming an unlocked “sugar” residue. In one example, UNA also encompasses monomer with bonds between C1′-C4′ have been removed (i.e. the covalent carbon-oxygen-carbon bond between the C1′ and C4′ carbons). In another example, the C2′-C3′ bond (i.e. the covalent carbon-carbon bond between the C2′ and C3′ carbons) of the sugar has been removed (see Nuc. Acids Symp. Series, 52, 133-134 (2008) and Fluiter et al., Mol. Biosyst., 2009, 10, 1039 hereby incorporated by reference).

[0181] Representative U.S. publications that teach the preparation of UNA include, but are not limited to, U.S. Pat. No. 8,314,227; and US Patent Publication Nos. 2013/0096289; 2013/0011922; and 2011/0313020, the entire contents of each of which are hereby incorporated herein by reference.

[0182] The ribose molecule can be modified with a cyclopropane ring to produce a tricyclodeoxynucleic acid (tricyclo DNA). The ribose moiety can be substituted for another sugar such as 1,5,-anhydrohexitol, threose to produce a threose nucleoside (TNA), or arabinose to produce an arabino nucleoside. The ribose molecule can be replaced with non-sugars such as cyclohexene to produce cyclohexene nucleoside or glycol to produce glycol nucleosides.

[0183] Potentially stabilizing modifications to the ends of nucleoside molecules can include N-(acetylaminocaproyl)-4-hydroxyprolinol (Hyp-C6-NHAc), N-(caproyl-4-hydroxyprolinol (Hyp-C6), N-(acetyl-4-hydroxyprolinol (Hyp-NHAc), thymidine-2′-O-deoxythymidine (ether), N-(aminocaproyl)-4-hydroxyprolinol (Hyp-C6-amino), 2-docosanoyl-uridine-3″-phosphate, inverted base dT(idT) and others. Disclosure of this modification can be found in PCT Publication No. WO 2011/005861.

[0184] Other alternatives chemistries of an oligonucleotide include a 5′ phosphate or 5′ phosphate mimic, e.g., a 5′-terminal phosphate or phosphate mimic of an oligonucleotide. Suitable phosphate mimics are disclosed in, for example US Patent Publication No. 2012/0157511, the entire contents of which are incorporated herein by reference.

[0185] Exemplary oligonucleotides comprise nucleosides with alternative sugar moieties and can comprise DNA or RNA nucleosides. In some aspects, the oligonucleotide comprises nucleosides comprising alternative sugar moieties and DNA nucleosides. Incorporation of alternative nucleosides into the oligonucleotide can enhance the affinity of the oligonucleotide for the target nucleic acid. In that case, the alternative nucleosides can be referred to as affinity enhancing alternative nucleotides.

[0186] In some aspects, the oligonucleotide comprises at least 1 alternative nucleoside, such as at least 2, at least 3, at least 4, at least 5, at least 6, at least 7, at least 8, at least 9, at least 10, at least 11, at least 12, at least 13, at least 14, at least 15 or at least 16 alternative nucleosides. In other aspects, the oligonucleotides comprise from 1 to 10 alternative nucleosides, such as from 2 to 9 alternative nucleosides, such as from 3 to 8 alternative nucleosides, such as from 4 to 7 alternative nucleosides, such as 6 or 7 alternative nucleosides. In an aspect, the oligonucleotide can comprise alternatives, which are independently selected from these three types of alternatives (alternative sugar moiety, alternative nucleobase, and alternative internucleoside linkage), or a combination thereof. In one aspect, the oligonucleotide comprises one or more nucleosides comprising alternative sugar moieties, e.g., 2′ sugar alternative nucleosides. In some aspects, the oligonucleotide comprises the one or more 2′ sugar alternative nucleoside independently selected from the group consisting of 2′-O-alkyl-RNA, 2′-O-methyl-RNA, 2′-alkoxy-RNA, 2′-O-methoxyethyl-RNA, 2′-amino-DNA, 2′-fluoro-DNA, arabino nucleic acid (ANA), 2′-fluoro-ANA, and BNA (e.g., LNA) nucleosides. In some aspects, the one or more alternative nucleoside is a BNA.

[0187] In some aspects, at least 1 of the alternative nucleosides is a BNA (e.g., an LNA), such as at least 2, such as at least 3, at least 4, at least 5, at least 6, at least 7, or at least 8 of the alternative nucleosides are BNAs. In a still further aspect, all the alternative nucleosides are BNAs.

[0188] In a further aspect the oligonucleotide comprises at least one alternative internucleoside linkage. In some aspects, the internucleoside linkages within the contiguous nucleotide sequence are phosphorothioate or boronophosphate internucleoside linkages. In some aspects, all the internucleotide linkages in the contiguous sequence of the oligonucleotide are phosphorothioate linkages. In some aspects, the phosphorothioate linkages are stereochemically pure phosphorothioate linkages. In some aspects, the phosphorothioate linkages are Sp phosphorothioate linkages. In other aspects, the phosphorothioate linkages are Rp phosphorothioate linkages.

[0189] In some aspects, the oligonucleotide comprises at least one alternative nucleoside which is a 2′-MOE-RNA, such as 2, 3, 4, 5, 6, 7, 8, 9, or 10 2′-MOE-RNA nucleoside units. In some aspects, the 2′-MOE-RNA nucleoside units are connected by phosphorothioate linkages. In some aspects, at least one of said alternative nucleoside is 2′-fluoro DNA, such as 2, 3, 4, 5, 6, 7, 8, 9, or 10 2′-fluoro-DNA nucleoside units. In some aspects, the oligonucleotide comprises at least one BNA unit and at least one 2′ substituted modified nucleoside. In some aspects, the oligonucleotide comprises both 2′ sugar modified nucleosides and DNA units. In some aspects, the oligonucleotide or contiguous nucleotide region thereof is a gapmer oligonucleotide.

[0190] B. Oligonucleotides Conjugated to Ligands

[0191] Oligonucleotides can be chemically linked to one or more ligands, moieties, or conjugates that enhance the activity, cellular distribution, or cellular uptake of the oligonucleotide. Such moieties include but are not limited to lipid moieties such as a cholesterol moiety (Letsinger et al., (1989) Proc. Natl. Acid. Sci. USA, 86: 6553-6556), cholic acid (Manoharan et al., (1994) Biorg. Med. Chem. Let., 4:1053-1060), a thioether, e.g., beryl-S-tritylthiol (Manoharan et al., (1992) Ann. N.Y. Acad. Sci., 660:306-309; Manoharan et al., (1993) Biorg. Med. Chem. Let., 3:2765-2770), a thiocholesterol (Oberhauser et al., (1992) Nucl. Acids Res., 20:533-538), an aliphatic chain, e.g., dodecandiol or undecyl residues (Saison-Behmoaras et al., (1991) EMBO J, 10:1111-1118; Kabanov et al., (1990) FEBS Lett., 259:327-330; Svinarchuk et al., (1993) Biochimie, 75:49-54), a phospholipid, e.g., di-hexadecyl-rac-glycerol or triethyl-ammonium 1,2-di-O-hexadecyl-rac-glycero-3-phosphonate (Manoharan et al., (1995) Tetrahedron Lett., 36:3651-3654; Shea et al., (1990) Nucl. Acids Res., 18:3777-3783), a polyamine or a polyethylene glycol chain (Manoharan et al., (1995) Nucleosides & Nucleotides, 14:969-973), or adamantane acetic acid (Manoharan et al., (1995) Tetrahedron Lett., 36:3651-3654), a palmityl moiety (Mishra et al., (1995) Biochim. Biophys. Acta, 1264:229-237), or an octadecylamine or hexylamino-carbonyloxycholesterol moiety (Crooke et al., (1996) J. Pharmacol. Exp. Ther., 277:923-937).

[0192] In one aspect, a ligand alters the distribution, targeting, or lifetime of an oligonucleotide agent into which it is incorporated. In some aspects, a ligand provides an enhanced affinity for a selected target, e.g., molecule, cell or cell type, compartment, e.g., a cellular or organ compartment, tissue, organ, or region of the body, as, e.g., compared to a species absent such a ligand.

[0193] Ligands can include a naturally occurring substance, such as a protein (e.g., human serum albumin (HSA), low-density lipoprotein (LDL), or globulin); carbohydrate (e.g., a dextran, pullulan, chitin, chitosan, inulin, cyclodextrin, N-acetylglucosamine, N-acetylgalactosamine, or hyaluronic acid); or a lipid. The ligand can be a recombinant or synthetic molecule, such as a synthetic polymer, e.g., a synthetic polyamino acid. Examples of polyamino acids include polyamino acid is a polylysine (PLL), poly L-aspartic acid, poly L-glutamic acid, styrene-maleic acid anhydride copolymer, poly(L-lactide-co-glycolied) copolymer, divinyl ether-maleic anhydride copolymer, N-(2-hydroxypropyl)methacrylamide copolymer (HMPA), polyethylene glycol (PEG), polyvinyl alcohol (PVA), polyurethane, poly(2-ethylacryllic acid), N-isopropylacrylamide polymers, or polyphosphazine. Example of polyamines include: polyethylenimine, polylysine (PLL), spermine, spermidine, polyamine, pseudopeptide-polyamine, peptidomimetic polyamine, dendrimer polyamine, arginine, amidine, protamine, cationic lipid, cationic porphyrin, quaternary salt of a polyamine, or an alpha helical peptide.

[0194] Ligands can include targeting groups, e.g., a cell or tissue targeting agent, e.g., a lectin, glycoprotein, lipid or protein, e.g., an antibody, that binds to a specified cell type such as a kidney cell. A targeting group can be a thyrotropin, melanotropin, lectin, glycoprotein, surfactant protein A, Mucin carbohydrate, multivalent lactose, multivalent galactose, N-acetyl-galactosamine, N-acetyl-gulucosamine multivalent mannose, multivalent fucose, glycosylated polyaminoacids, multivalent galactose, transferrin, bisphosphonate, polyglutamate, polyaspartate, a lipid, cholesterol, a steroid, bile acid, folate, vitamin B12, vitamin A, biotin, or an RGD peptide or RGD peptide mimetic.

[0195] Other examples of ligands include dyes, intercalating agents (e.g. acridines), cross-linkers (e.g. psoralen, mitomycin C), porphyrins (TPPC4, texaphyrin, Sapphyrin), polycyclic aromatic hydrocarbons (e.g., phenazine, dihydrophenazine), artificial endonucleases (e.g. EDTA), lipophilic molecules, e.g., cholesterol, cholic acid, adamantane acetic acid, 1-pyrene butyric acid, dihydrotestosterone, 1,3-Bis-O(hexadecyl)glycerol, geranyloxyhexyl group, hexadecylglycerol, borneol, menthol, 1,3-propanediol, heptadecyl group, palmitic acid, myristic acid,O3-(oleoyl)lithocholic acid, O3-(oleoyl)cholenic acid, dimethoxytrityl, or phenoxazine) and peptide conjugates (e.g., antennapedia peptide, Tat peptide), alkylating agents, phosphate, amino, mercapto, PEG (e.g., PEG-40K), MPEG, [MPEG]₂, polyamino, alkyl, substituted alkyl, radiolabeled markers, enzymes, haptens (e.g. biotin), transport/absorption facilitators (e.g., aspirin, vitamin E, folic acid), synthetic ribonucleases (e.g., imidazole, bisimidazole, histamine, imidazole clusters, acridine-imidazole conjugates, Eu3+ complexes of tetraazamacrocycles), dinitrophenyl, HRP, or AP.

[0196] Ligands can be proteins, e.g., glycoproteins, or peptides, e.g., molecules having a specific affinity for a co-ligand, or antibodies e.g., an antibody, that binds to a specified cell type such as a hepatic cell. Ligands can include hormones and hormone receptors. They can include non-peptidic species, such as lipids, lectins, carbohydrates, vitamins, cofactors, multivalent lactose, multivalent galactose, N-acetyl-galactosamine, N-acetyl-gulucosamine multivalent mannose, or multivalent fucose.

[0197] The ligand can be a substance, e.g., a drug, which can increase the uptake of the oligonucleotide agent into the cell, for example, by disrupting the cell's cytoskeleton, e.g., by disrupting the cell's microtubules, microfilaments, and/or intermediate filaments. The drug can be, for example, taxon, vincristine, vinblastine, cytochalasin, nocodazole, japlakinolide, latrunculin A, phalloidin, swinholide A, indanocine, or myoservin.

[0198] In some aspects, a ligand attached to an oligonucleotide as described herein acts as a pharmacokinetic modulator (PK modulator). PK modulators include lipophiles, bile acids, steroids, phospholipid analogues, peptides, protein binding agents, PEG, vitamins etc. Exemplary PK modulators include, but are not limited to, cholesterol, fatty acids, cholic acid, lithocholic acid, dialkylglycerides, diacylglyceride, phospholipids, sphingolipids, naproxen, ibuprofen, vitamin E, biotin etc. Oligonucleotides that comprise a number of phosphorothioate linkages are also known to bind to serum protein, thus short oligonucleotides, e.g., oligonucleotides of about 5 bases, 10 bases, 15 bases, or 20 bases, comprising multiple of phosphorothioate linkages in the backbone are also amenable as ligands (e.g. as PK modulating ligands). In addition, aptamers that bind serum components (e.g. serum proteins) are also suitable for use as PK modulating ligands in the aspects described herein.

[0199] Ligand-conjugated oligonucleotides can be synthesized by the use of an oligonucleotide that bears a pendant reactive functionality, such as that derived from the attachment of a linking molecule onto the oligonucleotide (described below). This reactive oligonucleotide can be reacted directly with commercially-available ligands, ligands that are synthesized bearing any of a variety of protecting groups, or ligands that have a linking moiety attached thereto.

[0200] The oligonucleotides used in the conjugates can be conveniently and routinely made through the well-known technique of solid-phase synthesis. Equipment for such synthesis is sold by several vendors including, for example, Applied Biosystems (Foster City, Calif.). Any other means for such synthesis known in the art can additionally or alternatively be employed. It is also known to use similar techniques to prepare other oligonucleotides, such as the phosphorothioates and alkylated derivatives.

[0201] In the ligand-conjugated oligonucleotides, such as the ligand-molecule bearing sequence-specific linked nucleosides, the oligonucleotides and oligonucleosides can be assembled on a suitable DNA synthesizer utilizing standard nucleotide or nucleoside precursors, or nucleotide or nucleoside conjugate precursors that already bear the linking moiety, ligand-nucleotide or nucleoside-conjugate precursors that already bear the ligand molecule, or non-nucleoside ligand-bearing building blocks.

[0202] When using conjugate precursors that already bear a linking moiety, the synthesis of the sequence-specific linked nucleosides is typically completed, and the ligand molecule is then reacted with the linking moiety to form the ligand-conjugated oligonucleotide. In some aspects, the oligonucleotides or linked nucleosides are synthesized by an automated synthesizer using phosphoramidites derived from ligand-nucleoside conjugates in addition to the standard phosphoramidites and non-standard phosphoramidites that are commercially available and routinely used in oligonucleotide synthesis.

[0203] i. Lipid Conjugates

[0204] In one aspect, the ligand or conjugate is a lipid or lipid-based molecule. Such a lipid or lipid-based molecule can bind a serum protein, e.g., human serum albumin (HSA). An HSA binding ligand allows for distribution of the conjugate to a target tissue, e.g., a non-kidney target tissue of the body. A lipid or lipid-based ligand can (a) increase resistance to degradation of the conjugate, (b) increase targeting or transport into a target cell or cell membrane, and/or (c) can be used to adjust binding to a serum protein, e.g., HSA.

[0205] In another aspect, the ligand is a moiety, e.g., a vitamin, which is taken up by a target cell, e.g., a proliferating cell. Exemplary vitamins include vitamin A, E, and K.

[0206] ii. Cell Permeation Agents

[0207] In another aspect, the ligand is a cell-permeation agent, such a helical cell-permeation agent. In one aspect, the agent is amphipathic. An exemplary agent is a peptide such as tat or antennopedia. If the agent is a peptide, it can be modified, including a peptidylmimetic, invertomers, non-peptide or pseudo-peptide linkages, and use of D-amino acids. In some aspects, the helical agent is an alpha-helical agent, which can have a lipophilic and a lipophobic phase.

[0208] The ligand can be a peptide or peptidomimetic. A peptidomimetic (also referred to herein as an oligopeptidomimetic) is a molecule capable of folding into a defined three-dimensional structure similar to a natural peptide. The attachment of peptide and peptidomimetics to oligonucleotide agents can affect pharmacokinetic distribution of the oligonucleotide, such as by enhancing cellular recognition and absorption. The peptide or peptidomimetic moiety can be about 5-50 amino acids long, e.g., about 5, 10, 15, 20, 25, 30, 35, 40, 45, or 50 amino acids long.

[0209] A peptide or peptidomimetic can be, for example, a cell permeation peptide, cationic peptide, amphipathic peptide, or hydrophobic peptide (e.g., consisting primarily of Tyr, Trp, or Phe). The peptide moiety can be a dendrimer peptide, constrained peptide or crosslinked peptide. In another alternative, the peptide moiety can include a hydrophobic membrane translocation sequence (MTS). An exemplary hydrophobic MTS-containing peptide is RFGF having the amino acid sequence AAVALLPAVLLALLAP. An RFGF analogue (e.g., amino acid sequence AALLPVLLAAP containing a hydrophobic MTS can be a targeting moiety. The peptide moiety can be a “delivery” peptide, which can carry large polar molecules including peptides, oligonucleotides, and protein across cell membranes. For example, sequences from the HIV Tat protein (GRKKRRQRRRPPQ and the Drosophila Antennapedia protein (RQIKIWFQNRRMKWKK have been found to be capable of functioning as delivery peptides. A peptide or peptidomimetic can be encoded by a random sequence of DNA, such as a peptide identified from a phage-display library, or one-bead-one-compound (OBOC) combinatorial library (Lam et al., Nature, 354:82-84, 1991). Examples of a peptide or peptidomimetic tethered to an oligonucleotide agent via an incorporated monomer unit for cell targeting purposes is an arginine-glycine-aspartic acid (RGD)-peptide, or RGD mimic. A peptide moiety can range in length from about 5 amino acids to about 40 amino acids. The peptide moieties can have a structural modification, such as to increase stability or direct conformational properties. Any of the structural modifications described below can be utilized.

[0210] An RGD peptide for use in the compositions and methods can be linear or cyclic, and can be modified, e.g., glycosylated or methylated, to facilitate targeting to a specific tissue(s). RGD-containing peptides and peptidiomimemtics can include D-amino acids, as well as synthetic RGD mimics. In addition to RGD, one can use other moieties that target the integrin ligand. Some conjugates of this ligand target PECAM-1 or VEGF.

[0211] A cell permeation peptide is capable of permeating a cell, e.g., a microbial cell, such as a bacterial or fungal cell, or a mammalian cell, such as a human cell. A microbial cell-permeating peptide can be, for example, an α-helical linear peptide (e.g., LL-37 or Ceropin P1), a disulfide bond-containing peptide (e.g., α-defensin, β-defensin, or bactenecin), or a peptide containing only one or two dominating amino acids (e.g., PR-39 or indolicidin). A cell permeation peptide can include a nuclear localization signal (NLS). For example, a cell permeation peptide can be a bipartite amphipathic peptide, such as MPG, which is derived from the fusion peptide domain of HIV-1 gp41 and the NLS of SV40 large T antigen (Simeoni et al., Nucl. Acids Res. 31:2717-2724, 2003).

[0212] iii. Carbohydrate Conjugates

[0213] In some aspects of the compositions and methods described herein, an oligonucleotide further comprises a carbohydrate. The carbohydrate conjugated oligonucleotides are advantageous for the in vivo delivery of nucleic acids, as well as compositions suitable for in vivo therapeutic use, as described herein. As used herein, “carbohydrate” refers to a compound which is either a carbohydrate per se made up of one or more monosaccharide units having at least 6 carbon atoms (which can be linear, branched or cyclic) with an oxygen, nitrogen or sulfur atom bonded to each carbon atom; or a compound having as a part thereof a carbohydrate moiety made up of one or more monosaccharide units each having at least six carbon atoms (which can be linear, branched or cyclic), with an oxygen, nitrogen or sulfur atom bonded to each carbon atom. Representative carbohydrates include the sugars (mono-, di-, tri- and oligosaccharides containing from about 4, 5, 6, 7, 8, or 9 monosaccharide units), and polysaccharides such as starches, glycogen, cellulose and polysaccharide gums. Specific monosaccharides include C5 and above (e.g., C5, C6, C7, or C8) sugars; di- and trisaccharides include sugars having two or three monosaccharide units (e.g., C5, C6, C7, or C8).

[0214] In one aspect, a carbohydrate conjugate for use in the compositions and methods described herein is a monosaccharide.

[0215] In some aspects, the carbohydrate conjugate further comprises one or more additional ligands as described above, such as, but not limited to, a PK modulator and/or a cell permeation peptide.

[0216] Additional carbohydrate conjugates (and linkers) suitable for use include those described in PCT Publication Nos. WO 2014/179620 and WO 2014/179627, the entire contents of each of which are incorporated herein by reference.

[0217] iv. Linkers

[0218] In some aspects, the conjugate or ligand described herein can be attached to an oligonucleotide with various linkers that can be cleavable or non-cleavable.

[0219] Linkers typically comprise a direct bond or an atom such as oxygen or sulfur, a unit such as NR^{B}, C(O), C(O)NH, SO, SO₂, SO₂NH or a chain of atoms, such as, but not limited to, substituted or unsubstituted alkyl, substituted or unsubstituted alkenyl, substituted or unsubstituted alkynyl, arylalkyl, arylalkenyl, arylalkynyl, heteroarylalkyl, heteroarylalkenyl, heteroarylalkynyl, heterocyclylalkyl, heterocyclylalkenyl, heterocyclylalkynyl, aryl, heteroaryl, heterocyclyl, cycloalkyl, cycloalkenyl, alkylarylalkyl, alkylarylalkenyl, alkylarylalkynyl, alkenylarylalkyl, alkenylarylalkenyl, alkenylarylalkynyl, alkynylarylalkyl, alkynylarylalkenyl, alkynylarylalkynyl, alkylheteroarylalkyl, alkylheteroarylalkenyl, alkylheteroarylalkynyl, alkenylheteroarylalkyl, alkenylheteroarylalkenyl, alkenylheteroarylalkynyl, alkynylheteroarylalkyl, alkynylheteroarylalkenyl, alkynylheteroarylalkynyl, alkylheterocyclylalkyl, alkylheterocyclylalkenyl, alkylhererocyclylalkynyl, alkenylheterocyclylalkyl, alkenylheterocyclylalkenyl, alkenylheterocyclylalkynyl, alkynylheterocyclylalkyl, alkynylheterocyclylalkenyl, alkynylheterocyclylalkynyl, alkylaryl, alkenylaryl, alkynylaryl, alkylheteroaryl, alkenylheteroaryl, alkynylhereroaryl, which one or more methylenes can be interrupted or terminated by O, S, S(O), SO₂, N(R⁸), C(O), substituted or unsubstituted aryl, substituted or unsubstituted heteroaryl, substituted or unsubstituted heterocyclic; where R⁸ is hydrogen, acyl, aliphatic or substituted aliphatic. In one aspect, the linker is between about 1-24, 2-24, 3-24, 4-24, 5-24, 6-24, 6-18, 7-18, 8-18, 7-17, 8-17, 6-16, 7-17, 8-16 or 1, 2, 3, 4, 5, 6, 7, 8, 9, 10, 11, 12, 13, 14, 15, 16, 17, 18, 19, 20, 21, 21, 22, 23, or 24 atoms.

[0220] A cleavable linking group is one which is sufficiently stable outside the cell, but which upon entry into a target cell is cleaved to release the two parts the linker is holding together. In some aspects, the cleavable linking group is cleaved at least about 10 times, 20, times, 30 times, 40 times, 50 times, 60 times, 70 times, 80 times, 90 times, or more, or at least about 100 times faster in a target cell or under a first reference condition (which can, e.g., be selected to mimic or represent intracellular conditions) than in the blood of a subject, or under a second reference condition (which can, e.g., be selected to mimic or represent conditions found in the blood or serum).

[0221] Cleavable linking groups are susceptible to cleavage agents, e.g., pH, redox potential, or the presence of degradative molecules. Generally, cleavage agents are more prevalent or found at higher levels or activities inside cells than in serum or blood. Examples of such degradative agents include: redox agents which are selective for particular substrates or which have no substrate specificity, including, e.g., oxidative or reductive enzymes or reductive agents such as mercaptans, present in cells, that can degrade a redox cleavable linking group by reduction; esterases; endosomes or agents that can create an acidic environment, e.g., those that result in a pH of five or lower; enzymes that can hydrolyze or degrade an acid cleavable linking group by acting as a general acid, peptidases (which can be substrate specific), and phosphatases.

[0222] A cleavable linkage group, such as a disulfide bond can be susceptible to pH. The pH of human serum is 7.4, while the average intracellular pH is slightly lower, ranging from about 7.1-7.3. Endosomes have a more acidic pH, in the range of 5.5-6.0, and lysosomes have an even more acidic pH at around 5.0. Some linkers will have a cleavable linking group that is cleaved at a preferred pH, thereby releasing a cationic lipid from the ligand inside the cell, or into the desired compartment of the cell.

[0223] A linker can include a cleavable linking group that is cleavable by a particular enzyme. The type of cleavable linking group incorporated into a linker can depend on the cell to be targeted. For example, a liver-targeting ligand can be linked to a cationic lipid through a linker that includes an ester group. Liver cells are rich in esterases, and therefore the linker will be cleaved more efficiently in liver cells than in cell types that are not esterase-rich. Other cell-types rich in esterases include cells of the lung, renal cortex, and testis.

[0224] Linkers that contain peptide bonds can be used when targeting cell types rich in peptidases, such as liver cells and synoviocytes.

[0225] In general, the suitability of a candidate cleavable linking group can be evaluated by testing the ability of a degradative agent (or condition) to cleave the candidate linking group. It will also be desirable to test the candidate cleavable linking group for the ability to resist cleavage in the blood or when in contact with other non-target tissue. Thus, one can determine the relative susceptibility to cleavage between at least two conditions, where at least one condition is selected to be indicative of cleavage in a target cell and another conditions is selected to be indicative of cleavage in other tissues or biological fluids, e.g., blood or serum. The evaluations can be carried out in cell free systems, in cells, in cell culture, in organ or tissue culture, or in whole animals. It can be useful to make initial evaluations in cell-free or culture conditions and to confirm by further evaluations in whole animals. In some aspects, useful candidate compounds are cleaved at least about 2, 4, 10, 20, 30, 40, 50, 60, 70, 80, 90, or 100 times faster in the cell (or under in vitro conditions selected to mimic intracellular conditions) as compared to blood or serum (or under in vitro conditions selected to mimic extracellular conditions).

[0226] a. Redox Cleavable Linking Groups

[0227] In one aspect, a cleavable linking group is a redox cleavable linking group that is cleaved upon reduction or oxidation. An example of reductively cleavable linking group is a disulphide linking group (—S—S—). To determine if a candidate cleavable linking group is a suitable “reductively cleavable linking group,” or for example is suitable for use with a particular oligonucleotide moiety and particular targeting agent one can look to methods described herein. For example, a candidate can be evaluated by incubation with dithiothreitol (DTT), or other reducing agent using reagents know in the art, which mimic the rate of cleavage which would be observed in a cell, e.g., a target cell. The candidates can be evaluated under conditions which are selected to mimic blood or serum conditions. In one aspect, candidate compounds are cleaved by at most about 10% in the blood. In other aspects, useful candidate compounds are degraded at least about 2, 4, 10, 20, 30, 40, 50, 60, 70, 80, 90, or 100 times faster in the cell (or under in vitro conditions selected to mimic intracellular conditions) as compared to blood (or under in vitro conditions selected to mimic extracellular conditions). The rate of cleavage of candidate compounds can be determined using standard enzyme kinetics assays under conditions chosen to mimic intracellular media and compared to conditions chosen to mimic extracellular media.

[0228] b. Phosphate-Based Cleavable Linking Groups

[0229] In another aspect, a cleavable linker comprises a phosphate-based cleavable linking group. A phosphate-based cleavable linking group is cleaved by agents that degrade or hydrolyze the phosphate group. An example of an agent that cleaves phosphate groups in cells are enzymes such as phosphatases in cells. Examples of phosphate-based linking groups are —O—P(O)(OR^{k})—O—, —O—P(S)(OR^{k})—O—, —O—P(S)(SR^{k})—O—, —S—P(O)(OR^{k})—O—, —O—P(O)(OR^{k})—S—, —S—P(O)(OR^{k})—S—, —O—P(S)(OR^{k})—S—, —S—P(S)(OR^{k})—O—, —O—P(O)(R^{k})—O—, —O—P(S)(R^{k})—O—, —S—P(O)(R^{k})—O—, —S—P(S)(R^{k})—O—, —S—P(O)(R^{k})—S—, —O—P(S)(R^{k})—S—. These candidates can be evaluated using methods analogous to those described above.

[0230] c. Acid Cleavable Linking Groups

[0231] In another aspect, a cleavable linker comprises an acid cleavable linking group. An acid cleavable linking group is a linking group that is cleaved under acidic conditions. In some aspects, acid cleavable linking groups are cleaved in an acidic environment with a pH of about 6.5 or lower (e.g., about 6.0, 5.75, 5.5, 5.25, 5.0, or lower), or by agents such as enzymes that can act as a general acid. In a cell, specific low pH organelles, such as endosomes and lysosomes can provide a cleaving environment for acid cleavable linking groups. Examples of acid cleavable linking groups include but are not limited to hydrazones, esters, and esters of amino acids. Acid cleavable groups can have the general formula —C═NN—, C(O)O, or —OC(O). In one aspect, the carbon is attached to the oxygen of the ester (the alkoxy group) is an aryl group, substituted alkyl group, or tertiary alkyl group such as dimethyl pentyl or t-butyl. These candidates can be evaluated using methods analogous to those described above.

[0232] d. Ester-Based Linking Groups

[0233] In another aspect, a cleavable linker comprises an ester-based cleavable linking group. An ester-based cleavable linking group is cleaved by enzymes such as esterases and amidases in cells. Examples of ester-based cleavable linking groups include but are not limited to esters of alkylene, alkenylene and alkynylene groups. Ester cleavable linking groups have the general formula —C(O)O—, or —OC(O)—. These candidates can be evaluated using methods analogous to those described above.

[0234] e. Peptide-Based Cleaving Groups

[0235] In yet another aspect, a cleavable linker comprises a peptide-based cleavable linking group. A peptide-based cleavable linking group is cleaved by enzymes such as peptidases and proteases in cells. Peptide-based cleavable linking groups are peptide bonds formed between amino acids to yield oligopeptides (e.g., dipeptides, tripeptides etc.) and polypeptides. Peptide-based cleavable groups do not include the amide group (—C(O)NH—). The amide group can be formed between any alkylene, alkenylene, or alkynelene. A peptide bond is a special type of amide bond formed between amino acids to yield peptides and proteins. The peptide based cleavage group is generally limited to the peptide bond (i.e., the amide bond) formed between amino acids yielding peptides and proteins and does not include the entire amide functional group. Peptide-based cleavable linking groups have the general formula —NHCHR^{A}C(O)NHCHR^{B}C(O)—, where R^{A} and R^{B} are the R groups of the two adjacent amino acids. These candidates can be evaluated using methods analogous to those described above.

[0236] In one aspect, an oligonucleotide is conjugated to a carbohydrate through a linker. Linkers include bivalent and trivalent branched linker groups. Linkers for oligonucleotide carbohydrate conjugates include, but are not limited to, those described in formulas 24-35 of PCT Publication No. WO 2018/195165.

[0237] Representative U.S. patents that teach the preparation of oligonucleotide conjugates include, but are not limited to, U.S. Pat. Nos. 4,828,979; 4,948,882; 5,218,105; 5,525,465; 5,541,313; 5,545,730; 5,552,538; 5,578,717, 5,580,731; 5,591,584; 5,109,124; 5,118,802; 5,138,045; 5,414,077; 5,486,603; 5,512,439; 5,578,718; 5,608,046; 4,587,044; 4,605,735; 4,667,025; 4,762,779; 4,789,737; 4,824,941; 4,835,263; 4,876,335; 4,904,582; 4,958,013; 5,082,830; 5,112,963; 5,214,136; 5,082,830; 5,112,963; 5,214,136; 5,245,022; 5,254,469; 5,258,506; 5,262,536; 5,272,250; 5,292,873; 5,317,098; 5,371,241, 5,391,723; 5,416,203, 5,451,463; 5,510,475; 5,512,667; 5,514,785; 5,565,552; 5,567,810; 5,574,142; 5,585,481; 5,587,371; 5,595,726; 5,597,696; 5,599,923; 5,599,928 and 5,688,941; 6,294,664; 6,320,017; 6,576,752; 6,783,931; 6,900,297; 7,037,646; 8,106,022, the entire contents of each of which are hereby incorporated herein by reference.

[0238] It is not necessary for all positions in a given compound to be uniformly modified, and in fact more than one of the aforementioned modifications can be incorporated in a single compound or even at a single nucleoside within an oligonucleotide. Oligonucleotide compounds that are chimeric compounds are also contemplated. Chimeric oligonucleotides typically contain at least one region wherein the RNA is modified so as to confer upon the oligonucleotide increased resistance to nuclease degradation, increased cellular uptake, and/or increased binding affinity for the target nucleic acid. An additional region of the oligonucleotide can serve as a substrate for enzymes capable of cleaving RNA:DNA. By way of example, RNase H is a cellular endonuclease which cleaves the RNA strand of an RNA:DNA duplex. Activation of RNase H, therefore, results in cleavage of the RNA target, thereby greatly enhancing the efficiency of oligonucleotide inhibition of gene expression. Consequently, comparable results can often be obtained with shorter oligonucleotides when chimeric oligonucleotides are used, compared to phosphorothioate deoxy oligonucleotides hybridizing to the same target region. Cleavage of the RNA target can be routinely detected by gel electrophoresis and, if necessary, associated nucleic acid hybridization techniques known in the art.

[0239] In certain instances, the nucleotides of an oligonucleotide can be modified by a non-ligand group. A number of non-ligand molecules have been conjugated to oligonucleotides in order to enhance the activity, cellular distribution, or cellular uptake of the oligonucleotide, and procedures for performing such conjugations are available in the scientific literature. Such non-ligand moieties have included lipid moieties, such as cholesterol (Kubo, T. et al., Biochem. Biophys. Res. Comm, 2007, 365(1):54-61; Letsinger et al., Proc. Natl. Acad. Sci. USA, 1989, 86:6553), cholic acid (Manoharan et al., Bioorg. Med. Chem. Lett., 1994, 4:1053), a thioether, e.g., hexyl-S-tritylthiol (Manoharan et al., Ann. N.Y. Acad. Sci., 1992, 660:306; Manoharan et al., Bioorg. Med. Chem. Let., 1993, 3:2765), a thiocholesterol (Oberhauser et al., Nucl. Acids Res., 1992, 20:533), an aliphatic chain, e.g., dodecandiol or undecyl residues (Saison-Behmoaras et al., EMBO J., 1991, 10:111; Kabanov et al., FEBS Lett., 1990, 259:327; Svinarchuk et al., Biochimie, 1993, 75:49), a phospholipid, e.g., di-hexadecyl-rac-glycerol or triethylammonium 1,2-di-O-hexadecyl-rac-glycero-3-H-phosphonate (Manoharan et al., Tetrahedron Lett., 1995, 36:3651; Shea et al., Nucl. Acids Res., 1990, 18:3777), a polyamine or a polyethylene glycol chain (Manoharan et al., Nucleosides & Nucleotides, 1995, 14:969), or adamantane acetic acid (Manoharan et al., Tetrahedron Lett., 1995, 36:3651), a palmityl moiety (Mishra et al., Biochim. Biophys. Acta, 1995, 1264:229), or an octadecylamine or hexylamino-carbonyl-oxycholesterol moiety (Crooke et al., J. Pharmacol. Exp. Ther., 1996, 277:923). Representative United States patents that teach the preparation of such oligonucleotide conjugates have been listed above. Typical conjugation protocols involve the synthesis of an oligonucleotide bearing an aminolinker at one or more positions of the sequence. The amino group is then reacted with the molecule being conjugated using appropriate coupling or activating reagents. The conjugation reaction can be performed either with the oligonucleotide still bound to the solid support or following cleavage of the oligonucleotide, in solution phase. Purification of the oligonucleotide conjugate by HPLC typically affords the pure conjugate.

[0240] IV. Pharmaceutical Uses

[0241] The oligonucleotide compositions described herein are useful in the methods described herein, and, while not bound by theory, are believed to exert their desirable effects through their ability to modulate the level, status, and/or activity of a MutLy heterodimer comprising MLH3, e.g., by inhibiting the activity or level of the MLH3 protein in a cell in a mammal.

[0242] An aspect relates to methods of treating disorders related to DNA mismatch repair such as trinucleotide repeat expansion disorders in a subject in need thereof. Another aspect includes reducing the level of MLH3 in a cell of a subject identified as having a trinucleotide repeat expansion disorder. Still another aspect includes a method of inhibiting expression of MLH3 in a cell in a subject. Further aspects include methods of decreasing trinucleotide repeat expansion in a cell. The methods include contacting a cell with an oligonucleotide, in an amount effective to inhibit expression of MLH3 in the cell, thereby inhibiting expression of MLH3 in the cell.

[0243] Based on the above methods, an oligonucleotide described herein, or a composition comprising such an oligonucleotide, for use in therapy, or for use as a medicament, or for use in treating disorders related to DNA mismatch repair such as trinucleotide repeat expansion disorders in a subject in need thereof, or for use in reducing the level of MLH3 in a cell of a subject identified as having a trinucleotide repeat expansion disorder, or for use in inhibiting expression of MLH3 in a cell in a subject, or for use in decreasing trinucleotide repeat expansion in a cell is contemplated. The uses include the contacting of a cell with the oligonucleotide, in an amount effective to inhibit expression of MLH3 in the cell, thereby inhibiting expression of MLH3 in the cell. Aspects described below in relation to the methods described herein are also applicable to these further aspects.

[0244] Contacting of a cell with an oligonucleotide can be done in vitro or in vivo. Contacting a cell in vivo with the oligonucleotide includes contacting a cell or group of cells within a subject, e.g., a human subject, with the oligonucleotide. Combinations of in vitro and in vivo methods of contacting a cell are also possible. Contacting a cell can be direct or indirect, as discussed above. Furthermore, contacting a cell can be accomplished via a targeting ligand, including any ligand described herein or known in the art. In some aspects, the targeting ligand is a carbohydrate moiety, e.g., a GalNAc₃ ligand, or any other ligand that directs the oligonucleotide to a site of interest. Cells can include those of the central nervous system, or muscle cells.

[0245] Inhibiting expression of a MLH3 gene includes any level of inhibition of a MLH3 gene, e.g., at least partial suppression of the expression of a MLH3 gene, such as an inhibition by at least about 20%. In some aspects, inhibition is by at least about 25%, at least about 30%, at least about 35%, at least about 40%, at least about 45%, at least about 50%, at least about 55%, at least about 60%, at least about 65%, at least about 70%, at least about 75%, at least about 80%, at least about 85%, at least about 90%, at least about 91%, at least about 92%, at least about 93%, at least about 94%, at least about 95%, at least about 96%, at least about 97%, at least about 98%, or at least about 99%.

[0246] The expression of a MLH3 gene can be assessed based on the level of any variable associated with MLH3 gene expression, e.g., MLH3 mRNA level or MLH3 protein level.

[0247] Inhibition can be assessed by a decrease in an absolute or relative level of one or more of these variables compared with a control level. The control level can be any type of control level that is utilized in the art, e.g., a pre-dose baseline level, or a level determined from a similar subject, cell, or sample that is untreated or treated with a control (such as, e.g., buffer only control or inactive agent control).

[0248] In some aspects, surrogate markers can be used to detect inhibition of MLH3. For example, effective treatment of a trinucleotide repeat expansion disorder, as demonstrated by acceptable diagnostic and monitoring criteria with an agent to reduce MLH3 expression can be understood to demonstrate a clinically relevant reduction in MLH3.

[0249] In some aspects of the methods described herein, expression of a MLH3 gene is inhibited by at least 20%, 25%, 30%, 35%, 40%, 45%, 50%, 55%, 60%, 65%, 70%, 75%, 80%, 85%, 90%, or 95%, or to below the level of detection of the assay. In some aspects, the methods include a clinically relevant inhibition of expression of MLH3, e.g., as demonstrated by a clinically relevant outcome after treatment of a subject with an agent to reduce the expression of MLH3.

[0250] Inhibition of the expression of a MLH3 gene can be manifested by a reduction of the amount of mRNA expressed by a first cell or group of cells (such cells can be present, for example, in a sample derived from a subject) in which a MLH3 gene is transcribed and which has or have been treated (e.g., by contacting the cell or cells with an oligonucleotide, or by administering an oligonucleotide to a subject in which the cells are or were present) such that the expression of a MLH3 gene is inhibited, as compared to a second cell or group of cells substantially identical to the first cell or group of cells but which has not or have not been so treated (control cell(s) not treated with an oligonucleotide or not treated with an oligonucleotide targeted to the gene of interest). The degree of inhibition can be expressed in terms of:

$$\frac{( mRNA in control cells ) - ( mRNA in treated cells )}{( mRNA in control cells )} \times 100 \%$$

[0251] In other aspects, inhibition of the expression of a MLH3 gene can be assessed in terms of a reduction of a parameter that is functionally linked to MLH3 gene expression, e.g., MLH3 protein expression or MLH3 signaling pathways. MLH3 gene silencing can be determined in any cell expressing MLH3, either endogenous or heterologous from an expression construct, and by any assay known in the art.

[0252] Inhibition of the expression of a MLH3 protein can be manifested by a reduction in the level of the MLH3 protein that is expressed by a cell or group of cells (e.g., the level of protein expressed in a sample derived from a subject). As explained above, for the assessment of mRNA suppression, the inhibition of protein expression levels in a treated cell or group of cells can similarly be expressed as a percentage of the level of protein in a control cell or group of cells.

A control cell or group of cells that can be used to assess the inhibition of the expression of a MLH3 gene includes a cell or group of cells that has not yet been contacted with an oligonucleotide described herein. For example, the control cell or group of cells can be derived from an individual subject (e.g., a human or animal subject) prior to treatment of the subject with an oligonucleotide.

[0253] The level of MLH3 mRNA that is expressed by a cell or group of cells can be determined using any method known in the art for assessing mRNA expression. In one aspect, the level of expression of MLH3 in a sample is determined by detecting a transcribed polynucleotide, or portion thereof, e.g., mRNA of the MLH3 gene. RNA can be extracted from cells using RNA extraction techniques including, for example, using acid phenol/guanidine isothiocyanate extraction (RNAzol B; Biogenesis), RNEASY™ RNA preparation kits (Qiagen) or PAXgene (PreAnalytix, Switzerland). Typical assay formats utilizing ribonucleic acid hybridization include nuclear run-on assays, RT-PCR, RNase protection assays, northern blotting, in situ hybridization, and microarray analysis. Circulating MLH3 mRNA can be detected using methods the described in PCT Publication WO2012/177906, the entire contents of which are hereby incorporated herein by reference. In some aspects, the level of expression of MLH3 is determined using a nucleic acid probe. The term “probe,” as used herein, refers to any molecule that is capable of selectively binding to a specific MLH3 sequence, e.g. to an mRNA or polypeptide. Probes can be synthesized by one of skill in the art, or derived from appropriate biological preparations. Probes can be specifically designed to be labeled. Examples of molecules that can be utilized as probes include, but are not limited to, RNA, DNA, proteins, antibodies, and organic molecules.

[0254] Isolated mRNA can be used in hybridization or amplification assays that include, but are not limited to, Southern or northern analyses, polymerase chain reaction (PCR) analyses, and probe arrays. One method for the determination of mRNA levels involves contacting the isolated mRNA with a nucleic acid molecule (probe) that can hybridize to MLH3 mRNA. In one aspect, the mRNA is immobilized on a solid surface and contacted with a probe, for example by running the isolated mRNA on an agarose gel and transferring the mRNA from the gel to a membrane, such as nitrocellulose. In an alternative aspect, the probe(s) are immobilized on a solid surface and the mRNA is contacted with the probe(s), for example, in an AFFYMETRIX gene chip array. A skilled artisan can readily adapt known mRNA detection methods for use in determining the level of MLH3 mRNA.

[0255] An alternative method for determining the level of expression of MLH3 in a sample involves the process of nucleic acid amplification and/or reverse transcriptase (to prepare cDNA) of for example mRNA in the sample, e.g., by RT-PCR (the experimental aspect set forth in Mullis, 1987, U.S. Pat. No. 4,683,202), ligase chain reaction (Barany (1991) Proc. Natl. Acad. Sci. USA 88:189-193), self-sustained sequence replication (Guatelli et al. (1990) Proc. Natl. Acad. Sci. USA 87:1874-1878), transcriptional amplification system (Kwoh et al. (1989) Proc. Natl. Acad. Sci. USA 86:1173-1177), Q-Beta Replicase (Lizardi et al. (1988) Bio/Technology 6:1197), rolling circle replication (Lizardi et al., U.S. Pat. No. 5,854,033) or any other nucleic acid amplification method, followed by the detection of the amplified molecules using techniques well known to those of skill in the art. These detection schemes are especially useful for the detection of nucleic acid molecules if such molecules are present in very low numbers. In some aspects, the level of expression of MLH3 is determined by quantitative fluorogenic RT-PCR (i.e., the TAQMAN™ System) or the DUAL-GLO® Luciferase assay.

[0256] The expression levels of MLH3 mRNA can be monitored using a membrane blot (such as used in hybridization analysis such as northern, Southern, dot, and the like), or microwells, sample tubes, gels, beads or fibers (or any solid support comprising bound nucleic acids). See U.S. Pat. Nos. 5,770,722; 5,874,219; 5,744,305; 5,677,195; and 5,445,934, which are incorporated herein by reference. The determination of MLH3 expression level can comprise using nucleic acid probes in solution.

[0257] In some aspects, the level of mRNA expression is assessed using branched DNA (bDNA) assays or real time PCR (qPCR). The use of this PCR method is described and exemplified in the Examples presented herein. Such methods can be used for the detection of MLH3 nucleic acids.

[0258] The level of MLH3 protein expression can be determined using any method known in the art for the measurement of protein levels. Such methods include, for example, electrophoresis, capillary electrophoresis, high performance liquid chromatography (HPLC), thin layer chromatography (TLC), hyperdiffusion chromatography, fluid or gel precipitin reactions, absorption spectroscopy, a colorimetric assays, spectrophotometric assays, flow cytometry, immunodiffusion (single or double), immunoelectrophoresis, western blotting, radioimmunoassay (RIA), enzyme-linked immunosorbent assays (ELISAs), immunofluorescent assays, electrochemiluminescence assays, and the like. Such assays can be used for the detection of proteins indicative of the presence or replication of MLH3 proteins.

[0259] In some aspects of the methods described herein, the oligonucleotide is administered to a subject such that the oligonucleotide is delivered to a specific site within the subject. The inhibition of expression of MLH3 can be assessed using measurements of the level or change in the level of MLH3 mRNA or MLH3 protein in a sample derived from a specific site within the subject. In some aspects, the methods include a clinically relevant inhibition of expression of MLH3, e.g., as demonstrated by a clinically relevant outcome after treatment of a subject with an agent to reduce the expression of MLH3.

[0260] In other aspects, the oligonucleotide is administered in an amount and for a time effective to result in one of (or more, e.g., two or more, three or more, four or more of): (a) decrease the number of trinucleotide repeats, (b) decrease the level of polyglutamine, (c) decreased cell death (e.g., CNS cell death and/or muscle cell death), (d) delayed onset of the disorder, (e) increased survival of subject, and (f) increased progression free survival of a subject.

[0261] Treating trinucleotide repeat expansion disorders can result in an increase in average survival time of an individual or a population of subjects treated with an oligonucleotide described herein in comparison to a population of untreated subjects. For example, the survival time of an individual or average survival time of a population is increased by more than 30 days (more than 60 days, 90 days, or 120 days). An increase in survival time of an individual or in average survival time of a population can be measured by any reproducible means. An increase in survival time of an individual can be measured, for example, by calculating for an individual the length of survival time following the initiation of treatment with the compound described herein. An increase in average survival time of a population can be measured, for example, by calculating for the average length of survival time following initiation of treatment with the compound described herein. An increase in survival time of an individual can be measured, for example, by calculating for an individual length of survival time following completion of a first round of treatment with a compound or pharmaceutically acceptable salt of a compound described herein. An increase in average survival time of a population can be measured, for example, by calculating for a population the average length of survival time following completion of a first round of treatment with a compound or pharmaceutically acceptable salt of a compound described herein.

[0262] Treating trinucleotide repeat expansion disorders can result in a decrease in the mortality rate of a population of treated subjects in comparison to an untreated population. For example, the mortality rate is decreased by more than 2% (e.g., more than 5%, 10%, or 25%). A decrease in the mortality rate of a population of treated subjects can be measured by any reproducible means, for example, by calculating for a population the average number of disease-related deaths per unit time following initiation of treatment with a compound or pharmaceutically acceptable salt of a compound described herein. A decrease in the mortality rate of a population can be measured, for example, by calculating for a population the average number of disease-related deaths per unit time following completion of a first round of treatment with a compound or pharmaceutically acceptable salt of a compound described herein.

[0263] A. Delivery of anti-MLH3 Agents

[0264] The delivery of an oligonucleotide to a cell e.g., a cell within a subject, such as a human subject e.g., a subject in need thereof, such as a subject having a trinucleotide repeat expansion disorder can be achieved in a number of different ways. For example, delivery can be performed by contacting a cell with an oligonucleotide described herein either in vitro or in vivo. In vivo delivery can be performed directly by administering a composition comprising an oligonucleotide to a subject. These alternatives are discussed further below.

[0265] In general, any method of delivering a nucleic acid molecule (in vitro or in vivo) can be adapted for use with an oligonucleotide (see e.g., Akhtar S. and Julian R L., (1992) Trends Cell. Biol. 2(5):139-144 and WO94/02595, which are incorporated herein by reference in their entireties). For in vivo delivery, factors to consider in order to deliver an oligonucleotide molecule include, for example, biological stability of the delivered molecule, prevention of non-specific effects, and accumulation of the delivered molecule in the target tissue. The non-specific effects of an oligonucleotide can be minimized by local administration, for example, by direct injection or implantation into a tissue or topically administering the preparation. Local administration to a treatment site maximizes local concentration of the agent, limits the exposure of the agent to systemic tissues that can otherwise be harmed by the agent or that can degrade the agent, and permits a lower total dose of the oligonucleotide to be administered.

[0266] For administering an oligonucleotide systemically for the treatment of a disease, the oligonucleotide can include alternative nucleobases, alternative sugar moieties, and/or alternative internucleoside linkages, or alternatively delivered using a drug delivery system; both methods act to prevent the rapid degradation of the oligonucleotide by endo- and exo-nucleases in vivo. Modification of the oligonucleotide or the pharmaceutical carrier can permit targeting of the oligonucleotide composition to the target tissue and avoid undesirable off-target effects. Oligonucleotide molecules can be modified by chemical conjugation to lipophilic groups such as cholesterol to enhance cellular uptake and prevent degradation. In an alternative aspect, the oligonucleotide can be delivered using drug delivery systems such as a nanoparticle, a lipid nanoparticle, a polyplex nanoparticle, a lipoplex nanoparticle, a dendrimer, a polymer, liposomes, or a cationic delivery system. Positively charged cationic delivery systems facilitate binding of an oligonucleotide molecule (negatively charged) and also enhance interactions at the negatively charged cell membrane to permit efficient uptake of an oligonucleotide by the cell. Cationic lipids, dendrimers, or polymers can either be bound to an oligonucleotide, or induced to form a vesicle or micelle that encases an oligonucleotide. The formation of vesicles or micelles further prevents degradation of the oligonucleotide when administered systemically. In general, any methods of delivery of nucleic acids known in the art can be adaptable to the delivery of the oligonucleotides described herein. Methods for making and administering cationic oligonucleotide complexes are well within the abilities of one skilled in the art (see e.g., Sorensen, D R., et al. (2003) J. Mol. Biol 327:761-766; Verma, U N. et al., (2003) Clin. Cancer Res. 9:1291-1300; Arnold, A S et al., (2007) J. Hypertens. 25:197-205, which are incorporated herein by reference in their entirety). Some non-limiting examples of drug delivery systems useful for systemic delivery of oligonucleotides include DOTAP (Sorensen, D R., et al (2003), supra; Verma, U N. et al., (2003), supra), Oligofectamine, “solid nucleic acid lipid particles” (Zimmermann, T S. et al., (2006) Nature 441:111-114), cardiolipin (Chien, P Y. et al., (2005) Cancer Gene Ther. 12:321-328; Pal, A. et al., (2005) Int J. Oncol. 26:1087-1091), polyethyleneimine (Bonnet M E. et al., (2008) Pharm. Res. August 16 Epub ahead of print; Aigner, A. (2006) J. Biomed. Biotechnol. 71659), Arg-Gly-Asp (RGD) peptides (Liu, S. (2006) Mol. Pharm. 3:472-487), and polyamidoamines (Tomalia, D A. et al., (2007) Biochem. Soc. Trans. 35:61-67; Yoo, H. et al., (1999) Pharm. Res. 16:1799-1804). In some aspects, an oligonucleotide forms a complex with cyclodextrin for systemic administration. Methods for administration and pharmaceutical compositions of oligonucleotides and cyclodextrins can be found in U.S. Pat. No. 7,427,605, which is herein incorporated by reference in its entirety. In some aspects, the oligonucleotides described herein are delivered by polyplex or lipoplex nanoparticles. Methods for administration and pharmaceutical compositions of oligonucleotides and polyplex nanoparticles and lipoplex nanoparticles can be found in U.S. Patent Application Nos. 2017/0121454; 2016/0369269; 2016/0279256; 2016/0251478; 2016/0230189; 2015/0335764; 2015/0307554; 2015/0174549; 2014/0342003; 2014/0135376; and 2013/0317086, which are herein incorporated by reference in their entirety.

[0267] i. Membranous Molecular Assembly Delivery Methods

[0268] The oligonucleotides can be delivered using a variety of membranous molecular assembly delivery methods including polymeric, biodegradable microparticle, or microcapsule delivery devices known in the art. For example, a colloidal dispersion system can be used for targeted delivery of an oligonucleotide agent described herein. Colloidal dispersion systems include macromolecule complexes, nanocapsules, microspheres, beads, and lipid-based systems including oil-in-water emulsions, micelles, mixed micelles, and liposomes. Liposomes are artificial membrane vesicles that are useful as delivery vehicles in vitro and in vivo. It has been shown that large unilamellar vesicles (LUV), which range in size from 0.2-4.0 μm can encapsulate a substantial percentage of an aqueous buffer containing large macromolecules. Liposomes are useful for the transfer and delivery of active ingredients to the site of action. Because the liposomal membrane is structurally similar to biological membranes, when liposomes are applied to a tissue, the liposomal bilayer fuses with bilayer of the cellular membranes. As the merging of the liposome and cell progresses, the internal aqueous contents that include the oligonucleotide are delivered into the cell where the oligonucleotide can specifically bind to a target RNA and can mediate RNase H-mediated gene silencing. In some cases, the liposomes are also specifically targeted, e.g., to direct the oligonucleotide to particular cell types. The composition of the liposome is usually a combination of phospholipids, usually in combination with steroids, especially cholesterol. Other phospholipids or other lipids can be used. The physical characteristics of liposomes depend on pH, ionic strength, and the presence of divalent cations.

[0269] A liposome containing an oligonucleotide can be prepared by a variety of methods. In one example, the lipid component of a liposome is dissolved in a detergent so that micelles are formed with the lipid component. For example, the lipid component can be an amphipathic cationic lipid or lipid conjugate. The detergent can have a high critical micelle concentration and can be nonionic. Exemplary detergents include cholate, CHAPS, octylglucoside, deoxycholate, and lauroyl sarcosine. The oligonucleotide preparation is then added to the micelles that include the lipid component. The cationic groups on the lipid interact with the oligonucleotide and condense around the oligonucleotide to form a liposome. After condensation, the detergent is removed, e.g., by dialysis, to yield a liposomal preparation of oligonucleotide.

[0270] If necessary, a carrier compound that assists in condensation can be added during the condensation reaction, e.g., by controlled addition. For example, the carrier compound can be a polymer other than a nucleic acid (e.g., spermine or spermidine). The pH can be adjusted to favor condensation.

[0271] Methods for producing stable polynucleotide delivery vehicles, which incorporate a polynucleotide/cationic lipid complex as a structural component of the delivery vehicle, are further described in, e.g., WO 96/37194, the entire contents of which are incorporated herein by reference. Liposome formation can include one or more aspects of exemplary methods described in Feigner, P. L. et al., (1987) Proc. Natl. Acad. Sci. USA 8:7413-7417; U.S. Pat. Nos. 4,897,355; 5,171,678; Bangham et al., (1965) M. Mol. Biol. 23:238; Olson et al., (1979) Biochim. Biophys. Acta 557:9; Szoka et al., (1978) Proc. Natl. Acad. Sci. 75: 4194; Mayhew et al., (1984) Biochim. Biophys. Acta 775:169; Kim et al., (1983) Biochim. Biophys. Acta 728:339; and Fukunaga et al., (1984) Endocrinol. 115:757. Commonly used techniques for preparing lipid aggregates of appropriate size for use as delivery vehicles include sonication and freeze-thaw plus extrusion (see, e.g., Mayer et al., (1986) Biochim. Biophys. Acta 858:161. Microfluidization can be used when consistently small (50 to 200 nm) and relatively uniform aggregates are desired (Mayhew et al., (1984) Biochim. Biophys. Acta 775:169). These methods are readily adapted to packaging oligonucleotide preparations into liposomes.

[0272] Liposomes fall into two broad classes. Cationic liposomes are positively charged liposomes which interact with the negatively charged nucleic acid molecules to form a stable complex. The positively charged nucleic acid/liposome complex binds to the negatively charged cell surface and is internalized in an endosome. Due to the acidic pH within the endosome, the liposomes are ruptured, releasing their contents into the cell cytoplasm (Wang et al. (1987) Biochem. Biophys. Res. Commun., 147:980-985).

[0273] Liposomes, which are pH-sensitive or negatively charged, entrap nucleic acids rather than complex with them. Since both the nucleic acid and the lipid are similarly charged, repulsion rather than complex formation occurs. Nevertheless, some nucleic acid is entrapped within the aqueous interior of these liposomes. pH sensitive liposomes have been used to deliver nucleic acids encoding the thymidine kinase gene to cell monolayers in culture. Expression of the exogenous gene was detected in the target cells (Zhou et al. (1992) Journal of Controlled Release, 19:269-274).

[0274] One major type of liposomal composition includes phospholipids other than naturally-derived phosphatidylcholine. Neutral liposome compositions, for example, can be formed from dimyristoyl phosphatidylcholine (DMPC) or dipalmitoyl phosphatidylcholine (DPPC). Anionic liposome compositions generally are formed from dimyristoyl phosphatidylglycerol, while anionic fusogenic liposomes are formed primarily from dioleoyl phosphatidylethanolamine (DOPE). Another type of liposomal composition is formed from phosphatidylcholine (PC) such as, for example, soybean PC, and egg PC. Another type is formed from mixtures of phospholipid and/or phosphatidylcholine and/or cholesterol.

[0275] Examples of other methods to introduce liposomes into cells in vitro and in vivo include U.S. Pat. Nos. 5,283,185; 5,171,678; WO 94/00569; WO 93/24640; WO 91/16024; Feigner, (1994) J. Biol. Chem. 269:2550; Nabel, (1993) Proc. Natl. Acad. Sci. 90:11307; Nabel, (1992) Human Gene Ther. 3:649; Gershon, (1993) Biochem. 32:7143; and Strauss, (1992) EMBO J. 11:417.

[0276] Non-ionic liposomal systems have also been examined to determine their utility in the delivery of drugs to the skin, in particular systems comprising non-ionic surfactant and cholesterol. Non-ionic liposomal formulations comprising NOVASOME™ I (glyceryl dilaurate/cholesterol/polyoxyethylene-10-stearyl ether) and NOVASOME™ II (glyceryl distearate/cholesterol/polyoxyethylene-10-stearyl ether) were used to deliver cyclosporin-A into the dermis of mouse skin. Results indicated that such non-ionic liposomal systems were effective in facilitating the deposition of cyclosporine A into different layers of the skin (Hu et al., (1994) S.T.P. Pharma. Sci., 4(6):466).

[0277] Liposomes can be sterically stabilized liposomes, comprising one or more specialized lipids that result in enhanced circulation lifetimes relative to liposomes lacking such specialized lipids. Examples of sterically stabilized liposomes are those in which part of the vesicle-forming lipid portion of the liposome (A) comprises one or more glycolipids, such as monosialoganglioside G_{M1}, or (B) is derivatized with one or more hydrophilic polymers, such as a polyethylene glycol (PEG) moiety. While not wishing to be bound by any particular theory, it is thought in the art that, at least for sterically stabilized liposomes containing gangliosides, sphingomyelin, or PEG-derivatized lipids, the enhanced circulation half-life of these sterically stabilized liposomes derives from a reduced uptake into cells of the reticuloendothelial system (RES) (Allen et al., (1987) FEBS Letters, 223:42; Wu et al., (1993) Cancer Research, 53:3765).

[0278] Various liposomes comprising one or more glycolipids are known in the art. Papahadjopoulos et al. (Ann. N.Y. Acad. Sci., (1987), 507:64) reported the ability of monosialoganglioside G^{M1}, galactocerebroside sulfate, and phosphatidylinositol to improve blood half-lives of liposomes. These findings were expounded upon by Gabizon et al. (Proc. Natl. Acad. Sci. U.S.A., (1988), 85:6949). U.S. Pat. No. 4,837,028 and WO 88/04924, both to Allen et al., disclose liposomes comprising (1) sphingomyelin and (2) the ganglioside G_{M1} or a galactocerebroside sulfate ester. U.S. Pat. No. 5,543,152 (Webb et al.) discloses liposomes comprising sphingomyelin. Liposomes comprising 1,2-sn-dimyristoylphosphatidylcholine are disclosed in WO 97/13499 (Lim et al).

[0279] In one aspect, cationic liposomes are used. Cationic liposomes possess the advantage of being able to fuse to the cell membrane. Non-cationic liposomes, although not able to fuse as efficiently with the plasma membrane, are taken up by macrophages in vivo and can be used to deliver oligonucleotides to macrophages.

[0280] Further advantages of liposomes include: liposomes obtained from natural phospholipids are biocompatible and biodegradable; liposomes can incorporate a wide range of water and lipid soluble drugs; liposomes can protect encapsulated oligonucleotides in their internal compartments from metabolism and degradation (Rosoff, in “Pharmaceutical Dosage Forms,” Lieberman, Rieger and Banker (Eds.), 1988, volume 1, p. 245). Important considerations in the preparation of liposome formulations are the lipid surface charge, vesicle size and the aqueous volume of the liposomes.

[0281] A positively charged synthetic cationic lipid, N-[1-(2,3-dioleyloxy)propyl]-N,N,N-trimethylammonium chloride (DOTMA) can be used to form small liposomes that interact spontaneously with nucleic acid to form lipid-nucleic acid complexes which are capable of fusing with the negatively charged lipids of the cell membranes of tissue culture cells, resulting in delivery of oligonucleotide (see, e.g., Feigner, P. L. et al., (1987) Proc. Natl. Acad. Sci. USA 8:7413-7417, and U.S. Pat. No. 4,897,355 for a description of DOTMA and its use with DNA).

[0282] A DOTMA analogue, 1,2-bis(oleoyloxy)-3-(trimethylammonia)propane (DOTAP) can be used in combination with a phospholipid to form DNA-complexing vesicles. LIPOFECTIN™ Bethesda Research Laboratories, Gaithersburg, Md.) is an effective agent for the delivery of highly anionic nucleic acids into living tissue culture cells that comprise positively charged DOTMA liposomes which interact spontaneously with negatively charged polynucleotides to form complexes. When enough positively charged liposomes are used, the net charge on the resulting complexes is also positive. Positively charged complexes prepared in this way spontaneously attach to negatively charged cell surfaces, fuse with the plasma membrane, and efficiently deliver functional nucleic acids into, for example, tissue culture cells. Another commercially available cationic lipid, 1,2-bis(oleoyloxy)-3,3-(trimethylammonia)propane (“DOTAP”) (Boehringer Mannheim, Indianapolis, Ind.) differs from DOTMA in that the oleoyl moieties are linked by ester, rather than ether linkages.

[0283] Other reported cationic lipid compounds include those that have been conjugated to a variety of moieties including, for example, carboxyspermine which has been conjugated to one of two types of lipids and includes compounds such as 5-carboxyspermylglycine dioctaoleoylamide (“DOGS”) (TRANSFECTAM™, Promega, Madison, Wis.) and dipalmitoylphosphatidylethanolamine 5-carboxyspermyl-amide (“DPPES”) (see, e.g., U.S. Pat. No. 5,171,678).

[0284] Another cationic lipid conjugate includes derivatization of the lipid with cholesterol (“DC-Choi”) which has been formulated into liposomes in combination with DOPE (See, Gao, X. and Huang, L., (1991) Biochim. Biophys. Res. Commun. 179:280). Lipopolylysine, made by conjugating polylysine to DOPE, has been reported to be effective for transfection in the presence of serum (Zhou, X. et al., (1991) Biochim. Biophys. Acta 1065:8). For certain cell lines, these liposomes containing conjugated cationic lipids, are said to exhibit lower toxicity and provide more efficient transfection than the DOTMA-containing compositions. Other commercially available cationic lipid products include DMRIE and DMRIE-HP (Vical, La Jolla, Calif.) and Lipofectamine (DOSPA) (Life Technology, Inc., Gaithersburg, Md.). Other cationic lipids suitable for the delivery of oligonucleotides are described in WO 98/39359 and WO 96/37194.

[0285] Liposomal formulations are particularly suited for topical administration, liposomes present several advantages over other formulations. Such advantages include reduced side effects related to high systemic absorption of the administered drug, increased accumulation of the administered drug at the desired target, and the ability to administer oligonucleotide into the skin. In some implementations, liposomes are used for delivering oligonucleotide to epidermal cells and also to enhance the penetration of oligonucleotide into dermal tissues, e.g., into skin. For example, the liposomes can be applied topically. Topical delivery of drugs formulated as liposomes to the skin has been documented (see, e.g., Weiner et al., (1992) Journal of Drug Targeting, vol. 2, 405-410 and du Plessis et al., (1992) Antiviral Research, 18:259-265; Mannino, R. J. and Fould-Fogerite, S., (1998) Biotechniques 6:682-690; Itani, T. et al., (1987) Gene 56:267-276; Nicolau, C. et al. (1987) Meth. Enzymol. 149:157-176; Straubinger, R. M. and Papahadjopoulos, D. (1983) Meth. Enzymol. 101:512-527; Wang, C. Y. and Huang, L., (1987) Proc. Natl. Acad. Sci. USA 84:7851-7855).

[0286] Non-ionic liposomal systems have also been examined to determine their utility in the delivery of drugs to the skin, in particular systems comprising non-ionic surfactant and cholesterol. Non-ionic liposomal formulations comprising NOVASOME I (glyceryl dilaurate/cholesterol/polyoxyethylene-10-stearyl ether) and NOVASOME II (glyceryl distearate/cholesterol/polyoxyethylene-10-stearyl ether) were used to deliver a drug into the dermis of mouse skin. Such formulations with oligonucleotides are useful for treating a dermatological disorder.

[0287] The targeting of liposomes is also possible based on, for example, organ-specificity, cell-specificity, and organelle-specificity and is known in the art. In the case of a liposomal targeted delivery system, lipid groups can be incorporated into the lipid bilayer of the liposome to maintain the targeting ligand in stable association with the liposomal bilayer. Various linking groups can be used for joining the lipid chains to the targeting ligand. Additional methods are known in the art and are described, for example in U.S. Patent Application Publication No. 20060058255, the linking groups of which are herein incorporated by reference.

[0288] Liposomes that include oligonucleotides can be made highly deformable. Such deformability can enable the liposomes to penetrate through pore that are smaller than the average radius of the liposome. For example, transfersomes are yet another type of liposomes, and are highly deformable lipid aggregates which are attractive candidates for drug delivery vehicles. Transfersomes can be described as lipid droplets which are so highly deformable that they are easily able to penetrate through pores which are smaller than the droplet. Transfersomes can be made by adding surface edge activators, usually surfactants, to a standard liposomal composition. Transfersomes that include oligonucleotides can be delivered, for example, subcutaneously by infection to deliver oligonucleotides to keratinocytes in the skin. To cross intact mammalian skin, lipid vesicles must pass through a series of fine pores, each with a diameter less than 50 nm, under the influence of a suitable transdermal gradient. In addition, due to the lipid properties, these transfersomes can be self-optimizing (adaptive to the shape of pores, e.g., in the skin), self-repairing, and can frequently reach their targets without fragmenting, and often self-loading. Transfersomes have been used to deliver serum albumin to the skin. The transfersome-mediated delivery of serum albumin has been shown to be as effective as subcutaneous injection of a solution containing serum albumin.

[0289] Other suitable formulations are described in U.S. provisional application Ser. No. 61/018,616, filed Jan. 2, 2008; 61/018,611, filed Jan. 2, 2008; 61/039,748, filed Mar. 26, 2008; 61/047,087, filed Apr. 22, 2008 and 61/051,528, filed May 8, 2008. PCT application No. PCT/US2007/080331, filed Oct. 3, 2007 also describes suitable formulations.

[0290] Surfactants find wide application in formulations such as emulsions (including microemulsions) and liposomes. The most common way of classifying and ranking the properties of the many different types of surfactants, both natural and synthetic, is by the use of the hydrophile/lipophile balance (HLB). The nature of the hydrophilic group (also known as the “head”) provides the most useful means for categorizing the different surfactants used in formulations (Rieger, in Pharmaceutical Dosage Forms, Marcel Dekker, Inc., New York, N.Y., 1988, p. 285).

[0291] If the surfactant molecule is not ionized, it is classified as a nonionic surfactant. Nonionic surfactants find wide application in pharmaceutical and cosmetic products and are usable over a wide range of pH values. In general, their HLB values range from 2 to about 18 depending on their structure. Nonionic surfactants include nonionic esters such as ethylene glycol esters, propylene glycol esters, glyceryl esters, polyglyceryl esters, sorbitan esters, sucrose esters, and ethoxylated esters. Nonionic alkanolamides and ethers such as fatty alcohol ethoxylates, propoxylated alcohols, and ethoxylated/propoxylated block polymers are also included in this class. The polyoxyethylene surfactants are the most popular members of the nonionic surfactant class.

[0292] If the surfactant molecule carries a negative charge when it is dissolved or dispersed in water, the surfactant is classified as anionic. Anionic surfactants include carboxylates such as soaps, acyl lactylates, acyl amides of amino acids, esters of sulfuric acid such as alkyl sulfates and ethoxylated alkyl sulfates, sulfonates such as alkyl benzene sulfonates, acyl isethionates, acyl taurates and sulfosuccinates, and phosphates. The most important members of the anionic surfactant class are the alkyl sulfates and the soaps.

[0293] If the surfactant molecule carries a positive charge when it is dissolved or dispersed in water, the surfactant is classified as cationic. Cationic surfactants include quaternary ammonium salts and ethoxylated amines. The quaternary ammonium salts are the most used members of this class.

[0294] If the surfactant molecule has the ability to carry either a positive or negative charge, the surfactant is classified as amphoteric. Amphoteric surfactants include acrylic acid derivatives, substituted alkylamides, N-alkylbetaines, and phosphatides.

[0295] The use of surfactants in drug products, formulations and in emulsions has been reviewed (Rieger, in Pharmaceutical Dosage Forms, Marcel Dekker, Inc., New York, N.Y., 1988, p. 285).

[0296] The oligonucleotides for use in the methods can be provided as micellar formulations. Micelles are a particular type of molecular assembly in which amphipathic molecules are arranged in a spherical structure such that all the hydrophobic portions of the molecules are directed inward, leaving the hydrophilic portions in contact with the surrounding aqueous phase. The converse arrangement exists if the environment is hydrophobic.

[0297] ii. Lipid Nanoparticle-Based Delivery Methods

[0298] Oligonucleotides can be fully encapsulated in a lipid formulation, e.g., a lipid nanoparticle (LNP), or other nucleic acid-lipid particle. LNPs are extremely useful for systemic applications, as they exhibit extended circulation lifetimes following intravenous (i.v.) injection and accumulate at distal sites (e.g., sites physically separated from the administration site). LNPs include “pSPLP,” which include an encapsulated condensing agent-nucleic acid complex as set forth in PCT Publication No. WO 00/03683. The particles typically have a mean diameter of about 50 nm to about 150 nm, more typically about 60 nm to about 130 nm, more typically about 70 nm to about 110 nm, most typically about 70 nm to about 90 nm, and are substantially nontoxic. In addition, the nucleic acids when present in the nucleic acid-lipid particles are resistant in aqueous solution to degradation with a nuclease. Nucleic acid-lipid particles and their method of preparation are disclosed in, e.g., U.S. Pat. Nos. 5,976,567; 5,981,501; 6,534,484; 6,586,410; 6,815,432; U.S. Publication No. 2010/0324120 and PCT Publication No. WO 96/40964.

[0299] In one aspect, the lipid to drug ratio (mass/mass ratio) (e.g., lipid to oligonucleotide ratio) will be in the range of from about 1:1 to about 50:1, from about 1:1 to about 25:1, from about 3:1 to about 15:1, from about 4:1 to about 10:1, from about 5:1 to about 9:1, or about 6:1 to about 9:1. Ranges intermediate to the above recited ranges are also contemplated.

[0300] Non-limiting examples of cationic lipids include N,N-dioleyl-N,N-dimethylammonium chloride (DODAC), N,N-distearyl-N,N-dimethylammonium bromide (DDAB), N-(1-(2,3-dioleoyloxy)propyl)-N,N,N-trimethylammonium chloride (DOTAP), N-(1-(2,3-dioleyloxy)propyl)-N,N,N-trimethylammonium chloride (DOTMA), N,N-dimethyl-2,3-dioleyloxy)propylamine (DODMA), 1,2-DiLinoleyloxy-N,N-dimethylaminopropane (DLinDMA), 1,2-Dilinolenyloxy-N,N-dimethylaminopropane (DLenDMA), 1,2-Dilinoleylcarbamoyloxy-3-dimethylaminopropane (DLin-C-DAP), (dimethylamino)acetoxypropane (DLin-DAC), 1,2-Dilinoleyoxy-3-morpholinopropane (DLin-MA), 1,2-Dilinoleoyl-3-dimethylaminopropane (DLinDAP), 1,2-Dilinoleylthio-3-dimethylaminopropane (DLin-S-DMA), 1-Linoleoyl-2-linoleyloxy-3-dimethylaminopropane (DLin-2-DMAP), 1,2-Dilinoleyloxy-3-trimethylaminopropane chloride salt (DLin-TMA.Cl), 1,2-Dilinoleoyl-3-trimethylaminopropane chloride salt (DLin-TAP.Cl), 1,2-Dilinoleyloxy-3-(N-methylpiperazino)propane (DLin-MPZ), or 3-(N,N-Dilinoleylamino)-1,2-propanediol (DLinAP), 3-(N,N-Dioleylamino)-1,2-propanedio (DOAP), 1,2-Dilinoleyloxo-3-(2-N,N-dimethylamino)ethoxypropane (DLin-EG-DMA), 1,2-Dilinolenyloxy-N,N-dimethylaminopropane (DLinDMA), 2,2-Dilinoleyl-4-dimethylaminomethyl-[1,3]-dioxolane (DLin-K-DMA) or analogs thereof, (3aR,5s,6aS)—N,N-dimethyl-2,2-di((9Z,12Z)-octadeca-9,12-dienyetetrahydro-3aH-cyclopenta[d][1,3]dioxol-5-amine (ALN100), (6Z,9Z,28Z,31Z)-heptatriaconta-6,9,28,31-tetraen-19-yl4-(dimethylamino)butanoate (MC3), 1,1′-(2-(4-(2-((2-(bis(2-hydroxydodecyl)amino)ethyl)(2-hydroxydodecyl)amino)ethyl)piperazin-1-yeethylazanediyedidodecan-2-01 (Tech G1), or a mixture thereof. The cationic lipid can comprise, for example, from about 20 mol to about 50 mol % or about 40 mol % of the total lipid present in the particle.

[0301] The ionizable/non-cationic lipid can be an anionic lipid or a neutral lipid including, but not limited to, distearoylphosphatidylcholine (DSPC), dioleoylphosphatidylcholine (DOPC), dipalmitoylphosphatidylcholine (DPPC), dioleoylphosphatidylglycerol (DOPG), dipalmitoylphosphatidylglycerol (DPPG), dioleoyl-phosphatidylethanolamine (DOPE), palmitoyloleoylphosphatidylcholine (POPC), palmitoyloleoylphosphatidylethanolamine (POPE), dioleoyl-phosphatidylethanolamine 4-(N-maleimidomethyl)-cyclohexane-1-carboxylate (DOPE-mal), dipalmitoyl phosphatidyl ethanolamine (DPPE), dimyristoylphosphoethanolamine (DMPE), distearoyl-phosphatidyl-ethanolamine (DSPE), 16-O-monomethyl PE, 16-O-dimethyl PE, 18-1-trans PE, 1-stearoyl-2-oleoyl-phosphatidyethanolamine (SOPE), cholesterol, or a mixture thereof. The non-cationic lipid can be, for example, from about 5 mol % to about 90 mol %, about 10 mol %, or about 60 mol % if cholesterol is included, of the total lipid present in the particle.

[0302] The conjugated lipid that inhibits aggregation of particles can be, for example, a polyethyleneglycol (PEG)-lipid including, without limitation, a PEG-diacylglycerol (DAG), a PEG-dialkyloxypropyl (DAA), a PEG-phospholipid, a PEG-ceramide (Cer), or a mixture thereof. The PEG-DAA conjugate can be, for example, a PEG-dilauryloxypropyl (C₁₂), a PEG-dimyristyloxypropyl (C₁₄), a PEG-dipalmityloxypropyl (C₁₆), or a PEG-distearyloxypropyl (Cₘ). The conjugated lipid that prevents aggregation of particles can be, for example, from 0 mol % to about 20 mol % or about 2 mol % of the total lipid present in the particle.

[0303] In some aspects, the nucleic acid-lipid particle further includes cholesterol at, e.g., about 10 mol % to about 60 mol % or about 50 mol % of the total lipid present in the particle.

[0304] B. Combination Therapies

[0305] An oligonucleotide can be used alone or in combination with at least one additional therapeutic agent, e.g., other agents that treat trinucleotide repeat expansion disorders or symptoms associated therewith, or in combination with other types of therapies to treat trinucleotide repeat expansion disorders. In combination treatments, the dosages of one or more of the therapeutic compounds can be reduced from standard dosages when administered alone. For example, doses can be determined empirically from drug combinations and permutations or can be deduced by isobolographic analysis (e.g., Black et al., Neurology 65:S3-S6 (2005)). In this case, dosages of the compounds when combined should provide a therapeutic effect.

[0306] In some aspects, the oligonucleotide agents described herein can be used in combination with at least one additional therapeutic agent to treat a trinucleotide repeat expansion disorder associated with gene having a trinucleotide repeat (e.g., any of the trinucleotide repeat expansion disorders and associated genes having a trinucleotide repeat listed in Table 1). In some aspects, at least one of the additional therapeutic agents can be an oligonucleotide (e.g., an ASO) that hybridizes with the mRNA of gene associated with a trinucleotide repeat expansion disorder (e.g., any of the genes listed in Table 1). In some aspects, the trinucleotide repeat expansion disorder is Huntington's disease (HD). In some aspects, the gene associated with a trinucleotide repeat expansion disorder is Huntingtin (HTT). Several allelic variants of the Huntingtin gene have been implicated in the etiology of Huntington's disease. In some cases, these variants are identified on the basis of having unique HD-associated single nucleotide polymorphisms (SNPs). In some aspects, the oligonucleotide hybridizes to an mRNA of the Huntingtin gene containing any of the HD-associated SNPs known in the art (e.g., any of the HD-associated SNPs described in Skotte et al., PLoS One 2014, 9(9): e107434, Carroll et al., Mol. Ther. 2011, 19(12): 2178-85, Warby et al., Am. J. Hum. Gen. 2009, 84(3): 351-66 (herein incorporated by reference)). In some aspects, the oligonucleotide that is an additional therapeutic agent hybridizes to an mRNA of the Huntingtin gene lacking any of the HD-associated SNPs. In some of the aspects, the oligonucleotide hybridizes to an mRNA of the Huntingtin gene having any of the SNPs selected from the group of rs362307 and rs365331. In some aspects, the oligonucleotide that is an additional therapeutic agent can be a modified oligonucleotide (e.g., an oligonucleotide including any of the modifications described herein). In some aspects, the modified oligonucleotide that is an additional therapeutic agent comprises one or more phosphorothioate internucleoside linkages. In some aspects, the modified oligonucleotide that is an additional therapeutic agent comprises one or more 2′-MOE moieties. In some aspects, the oligonucleotide that is an additional therapeutic agent hybridizes to the mRNA of the Huntingtin gene has a sequence selected from the SEQ ID NOs. 6-285 of U.S. Pat. No. 9,006,198; SEQ ID NOs. 6-8 of US Patent Application Publication No. 2017/0044539; SEQ ID NOs. 1-1565 of US Patent Application Publication 2018/0216108; and SEQ ID NOs. 1-2432 of PCT Publication WO 2017/192679, the sequences of which are hereby incorporated by reference.

[0307] In some aspects, at least one of the additional therapeutic agent is a chemotherapeutic agent (e.g., a cytotoxic agent or other chemical compound useful in the treatment of a trinucleotide repeat expansion disorder).

[0308] in some aspects, at least one of the additional therapeutic agents can be a therapeutic agent which is a non-drug treatment. For example, at least one of the additional therapeutic agents is physical therapy.

[0309] In any of the combination aspects described herein, the two or more therapeutic agents can be administered simultaneously or sequentially, in either order. For example a first therapeutic agent can be administered immediately, up to 1 hour, up to 2 hours, up to 3 hours, up to 4 hours, up to 5 hours, up to 6 hours, up to 7 hours, up to, 8 hours, up to 9 hours, up to 10 hours, up to 11 hours, up to 12 hours, up to 13 hours, 14 hours, up to hours 16, up to 17 hours, up 18 hours, up to 19 hours up to 20 hours, up to 21 hours, up to 22 hours, up to 23 hours up to 24 hours or up to 1-7, 1-14, 1-21 or 1-30 days before or after one or more of the additional therapeutic agents.

[0310] V. Pharmaceutical Compositions

[0311] The oligonucleotides described herein can be formulated into pharmaceutical compositions for administration to human subjects in a biologically compatible form suitable for administration in vivo.

[0312] The compounds described herein can be used in the form of the free base, in the form of salts, solvates, and as prodrugs. All forms are within the methods described herein. In accordance with the methods described herein, the described oligonucleotides or salts, solvates, or prodrugs thereof can be administered to a patient in a variety of forms depending on the selected route of administration, as will be understood by those skilled in the art. The compounds described herein can be administered, for example, by oral, parenteral, intrathecal, intracerebroventricular, intraparenchymal, buccal, sublingual, nasal, rectal, patch, pump, or transdermal administration and the pharmaceutical compositions formulated accordingly. Parenteral administration includes intravenous, intraperitoneal, subcutaneous, intramuscular, transepithelial, nasal, intrapulmonary, intrathecal, intracerebroventricular, intraparenchymal, rectal, and topical modes of administration. Parenteral administration can be by continuous infusion over a selected period of time.

[0313] A compound described herein can be orally administered, for example, with an inert diluent or with an assimilable edible carrier, or it can be enclosed in hard or soft shell gelatin capsules, or it can be compressed into tablets, or it can be incorporated directly with the food of the diet. For oral therapeutic administration, a compound described herein can be incorporated with an excipient and used in the form of ingestible tablets, buccal tablets, troches, capsules, elixirs, suspensions, syrups, and wafers. A compound described herein can be administered parenterally. Solutions of a compound described herein can be prepared in water suitably mixed with a surfactant, such as hydroxypropylcellulose. Dispersions can be prepared in glycerol, liquid polyethylene glycols, DMSO, and mixtures thereof with or without alcohol, and in oils. Under ordinary conditions of storage and use, these preparations can contain a preservative to prevent the growth of microorganisms. Conventional procedures and ingredients for the selection and preparation of suitable formulations are described, for example, in Remington's Pharmaceutical Sciences (2012, 22nd ed.) and in The United States Pharmacopeia: The National Formulary (USP 41 NF 36), published in 2018. The pharmaceutical forms suitable for injectable use include sterile aqueous solutions or dispersions and sterile powders for the extemporaneous preparation of sterile injectable solutions or dispersions. In all cases the form must be sterile and must be fluid to the extent that can be easily administered via syringe. Compositions for nasal administration can conveniently be formulated as aerosols, drops, gels, and powders. Aerosol formulations typically include a solution or fine suspension of the active substance in a physiologically acceptable aqueous or non-aqueous solvent and are usually presented in single or multidose quantities in sterile form in a sealed container, which can take the form of a cartridge or refill for use with an atomizing device. Alternatively, the sealed container can be a unitary dispensing device, such as a single dose nasal inhaler or an aerosol dispenser fitted with a metering valve which is intended for disposal after use. Where the dosage form includes an aerosol dispenser, it will contain a propellant, which can be a compressed gas, such as compressed air or an organic propellant, such as fluorochlorohydrocarbon. The aerosol dosage forms can take the form of a pump-atomizer. Compositions suitable for buccal or sublingual administration include tablets, lozenges, and pastilles, where the active ingredient is formulated with a carrier, such as sugar, acacia, tragacanth, gelatin, and glycerine. Compositions for rectal administration are conveniently in the form of suppositories containing a conventional suppository base, such as cocoa butter

[0314] The compounds described herein can be administered to an animal, e.g., a human, alone or in combination with pharmaceutically acceptable carriers, as noted herein, the proportion of which is determined by the solubility and chemical nature of the compound, chosen route of administration, and standard pharmaceutical practice.

[0315] VI. Dosages

[0316] The dosage of the compositions (e.g., a composition including an oligonucleotide) described herein, can vary depending on many factors, such as the pharmacodynamic properties of the compound; the mode of administration; the age, health, and weight of the recipient; the nature and extent of the symptoms; the frequency of the treatment, and the type of concurrent treatment, if any; and the clearance rate of the compound in the animal to be treated. The compositions described herein can be administered initially in a suitable dosage that can be adjusted as required, depending on the clinical response. In some aspects, the dosage of a composition (e.g., a composition including an oligonucleotide) is a prophylactically or a therapeutically effective amount.

[0317] VII. Kits

[0318] Kits including (a) a pharmaceutical composition including an oligonucleotide agent that reduces the level and/or activity of MLH3 in a cell or subject described herein, and (b) a package insert with instructions to perform any of the methods described herein are contemplated. In some aspects, the kit includes (a) a pharmaceutical composition including an oligonucleotide agent that reduces the level and/or activity of MLH3 in a cell or subject described herein, (b) an additional therapeutic agent, and (c) a package insert with instructions to perform any of the methods described herein.

### EXAMPLES

### Example 1. Design and Selection of Antisense Oligonucleotides

[0319] Identification and selection of target transcripts: Target transcript selection and off-target scoring (below) utilized NCBI RefSeq sequences, downloaded from NCBI 21 Nov. 2018. Experimentally validated “NM” transcript models were used except for cynomolgus monkey, which only has “XM” predicted models for the large majority of genes. The longest human, mouse, rat, and cynomolgus monkey MLH3 transcript that contained all mapped internal exons was selected (SEQ IDs 1, 3, 4, and 5 for human, mouse, rat, and cynomolgus monkey, respectively, SEQ ID NO:2 is the protein sequence).

[0320] Selection of 20mer oligonucleotide sequences: All antisense 20mer sub-sequences per transcript were generated. Candidate antisense oligonucleotides (“ASOs”) were selected that met the following thermodynamic and physical characteristics determined by the inventors: predicted melting temperature of ASO:target duplex (“Tₘ”) of 30-65° C., predicted melting temperature of hairpins (“Tₕₐᵢᵣₚᵢₙ”)<35° C., predicted melting temperature of homopolymer formation (“Tₕₒₘₒ”)<25° C., GC content of 20-60%, no G homopolymers 4 or longer, and no A, T, or C homopolymers of 6 or longer. These selected or “preferred” oligonucleotides were further evaluated for specificity (off-target scoring, below).

[0321] Off-target scoring: The specificity of the preferred ASOs was evaluated via alignment to all unspliced RefSeq transcripts (“NM” models for human, mouse, and rat; “NM” and “XM” models for cynomolgus monkey), using the FASTA algorithm with an E value cutoff of 1000. The number of mismatches between each ASO and each transcript (per species) was tallied. An “off-target score” for each ASO in each species was calculated as the lowest number of mismatches to any transcript other than those encoded by the MLH3 gene.

[0322] Selection of ASOs for screening: A set of 480 preferred ASOs was selected for screening according to both specificity and ASO:mRNA (target) hybridization energy maximization information as follows. All candidate ASOs were evaluated for delta G of hybridization with the predicted target mRNA secondary structure (ΔG^{overall}) according to Xu and Mathews (Methods Mol Biol. 1490:15-34 (2016)). Next, two subsets of ASOs were chosen: First, 40 ASOs that matched human, cyno, and mouse target transcripts, had off-target scores of at least 1 in three species, and negative ΔG^{overall}; second, 440 ASOs that matched human and cyno target transcripts, had off-target scores of at least 2 in both species, and ΔG^{overall} less than −9.5 degrees Celsius.

[0323] The sequences, positions in human transcript, conservation in other species and species-specific off-target scores of each ASO are given in Table 2. Wherever indicated as “NC”, the ASO does not match the MLH3 gene in that species, and therefore off-target scores were not generated.

[0324] ASOs were synthesized as 5-10-5 “flanking sequence-DNA core sequence-flanking sequence” antisense oligonucleotides, with ribonucleotides at positions 1-5 and 16-20 and deoxyribonucleotides at positions 6-15, and with the following generic structure:

[0325] 5′-NmsNmsNmsNmsNmsNsNsNsNsNsNsNsNsNsNsNmsNmsNmsNmsNm-3′

### Wherein:

[0326] Nm: 2′-MOE residues (including 5methyl-2′-MOE-C and 5methyl-2′-MOE-U)
[0327] N: DNA/RNA residues
[0328] s: phosphorothioate (the backbone is fully phosphorothioate-modified)
[0329] All “C” within the DNA core (positions 6-15) are 5′-Methyl-2′-MOE-dC
[0330] All “T” in positions 1-5 or 16-20 are 5′-methyl-2′-MOE-U.

[0331] For primary screens at 2 nM and 20 nM, desalted oligonucleotides were used. For detailed characterization of a subset of oligonucleotides, oligonucleotides were further purified by HPLC.

TABLE 2
Exemplary Oligonucleotides

| SEQ | | | Off-target Score | | | |
|---|---|---|---|---|---|---|
| ID NO | Position | Sequence | Human | Cyno | Mouse | Rat |
| 6 | 75 | CTTGGATCTTGAGGCTCGTG | 3 | NC | NC | NC |
| 7 | 76 | CCTTGGATCTTGAGGCTCGT | 2 | NC | NC | NC |
| 8 | 77 | ACCTTGGATCTTGAGGCTCG | 3 | NC | NC | NC |
| 9 | 78 | CACCTTGGATCTTGAGGCTC | 2 | NC | NC | NC |
| 10 | 79 | GCACCTTGGATCTTGAGGCT | 2 | NC | NC | NC |
| 11 | 116 | AATTCTCCGACACCAACCGC | 3 | NC | NC | NC |
| 12 | 117 | AAATTCTCCGACACCAACCG | 3 | NC | NC | NC |
| 13 | 118 | CAAATTCTCCGACACCAACC | 2 | NC | NC | NC |
| 14 | 119 | ACAAATTCTCCGACACCAAC | 2 | NC | NC | NC |
| 15 | 120 | AACAAATTCTCCGACACCAA | 2 | NC | NC | NC |
| 16 | 121 | TAACAAATTCTCCGACACCA | 2 | NC | NC | NC |
| 17 | 122 | TTAACAAATTCTCCGACACC | 2 | NC | NC | NC |
| 18 | 123 | CTTAACAAATTCTCCGACAC | 3 | NC | NC | NC |
| 19 | 124 | GCTTAACAAATTCTCCGACA | 2 | NC | NC | NC |
| 20 | 125 | CGCTTAACAAATTCTCCGAC | 3 | NC | NC | NC |
| 21 | 126 | CCGCTTAACAAATTCTCCGA | 3 | NC | NC | NC |
| 22 | 127 | CCCGCTTAACAAATTCTCCG | 2 | NC | NC | NC |
| 23 | 128 | TCCCGCTTAACAAATTCTCC | 2 | NC | NC | NC |
| 24 | 129 | GTCCCGCTTAACAAATTCTC | 2 | NC | NC | NC |
| 25 | 130 | AGTCCCGCTTAACAAATTCT | 3 | NC | NC | NC |
| 26 | 131 | GAGTCCCGCTTAACAAATTC | 2 | NC | NC | NC |
| 27 | 132 | GGAGTCCCGCTTAACAAATT | 2 | NC | NC | NC |
| 28 | 133 | TGGAGTCCCGCTTAACAAAT | 3 | NC | NC | NC |
| 29 | 134 | CTGGAGTCCCGCTTAACAAA | 2 | NC | NC | NC |
| 30 | 135 | CCTGGAGTCCCGCTTAACAA | 3 | NC | NC | NC |
| 31 | 138 | TTGCCTGGAGTCCCGCTTAA | 3 | NC | NC | NC |
| 32 | 139 | ATTGCCTGGAGTCCCGCTTA | 3 | NC | NC | NC |
| 33 | 140 | AATTGCCTGGAGTCCCGCTT | 3 | NC | NC | NC |
| 34 | 141 | TAATTGCCTGGAGTCCCGCT | 3 | NC | NC | NC |
| 35 | 142 | ATAATTGCCTGGAGTCCCGC | 2 | NC | NC | NC |
| 36 | 143 | AATAATTGCCTGGAGTCCCG | 2 | NC | NC | NC |
| 37 | 144 | AAATAATTGCCTGGAGTCCC | 2 | NC | NC | NC |
| 38 | 145 | GAAATAATTGCCTGGAGTCC | 2 | NC | NC | NC |
| 39 | 146 | GGAAATAATTGCCTGGAGTC | 2 | NC | NC | NC |
| 40 | 147 | TGGAAATAATTGCCTGGAGT | 1 | NC | NC | NC |
| 41 | 148 | CTGGAAATAATTGCCTGGAG | 2 | NC | NC | NC |
| 42 | 149 | ACTGGAAATAATTGCCTGGA | 2 | NC | NC | NC |
| 43 | 150 | GACTGGAAATAATTGCCTGG | 1 | NC | NC | NC |
| 44 | 151 | TGACTGGAAATAATTGCCTG | 2 | NC | NC | NC |
| 45 | 152 | CTGACTGGAAATAATTGCCT | 1 | NC | NC | NC |
| 46 | 153 | TCTGACTGGAAATAATTGCC | 2 | NC | NC | NC |
| 47 | 154 | CTCTGACTGGAAATAATTGC | 2 | NC | NC | NC |
| 48 | 155 | TCTCTGACTGGAAATAATTG | 2 | NC | NC | NC |
| 49 | 156 | TTCTCTGACTGGAAATAATT | 2 | NC | NC | NC |
| 50 | 157 | CTTCTCTGACTGGAAATAAT | 2 | NC | NC | NC |
| 51 | 158 | CCTTCTCTGACTGGAAATAA | 2 | NC | NC | NC |
| 52 | 159 | TCCTTCTCTGACTGGAAATA | 1 | NC | NC | NC |
| 53 | 160 | TTCCTTCTCTGACTGGAAAT | 1 | NC | NC | NC |
| 54 | 162 | GTTTCCTTCTCTGACTGGAA | 0 | NC | NC | NC |
| 55 | 163 | GGTTTCCTTCTCTGACTGGA | 1 | NC | NC | NC |
| 56 | 164 | TGGTTTCCTTCTCTGACTGG | 2 | NC | NC | NC |
| 57 | 165 | CTGGTTTCCTTCTCTGACTG | 2 | NC | NC | NC |
| 58 | 166 | ACTGGTTTCCTTCTCTGACT | 2 | NC | NC | NC |
| 59 | 167 | CACTGGTTTCCTTCTCTGAC | 2 | NC | NC | NC |
| 60 | 168 | GCACTGGTTTCCTTCTCTGA | 2 | NC | NC | NC |
| 61 | 169 | GGCACTGGTTTCCTTCTCTG | 1 | NC | NC | NC |
| 62 | 170 | AGGCACTGGTTTCCTTCTCT | 1 | NC | NC | NC |
| 63 | 186 | AGATGGTGAGAATGCCAGGC | 2 | NC | NC | NC |
| 64 | 187 | AAGATGGTGAGAATGCCAGG | 2 | NC | NC | NC |
| 65 | 188 | AAAGATGGTGAGAATGCCAG | 1 | NC | NC | NC |
| 66 | 190 | AGAAAGATGGTGAGAATGCC | 1 | 1 | NC | NC |
| 67 | 191 | TAGAAAGATGGTGAGAATGC | 2 | 1 | NC | NC |
| 68 | 192 | GTAGAAAGATGGTGAGAATG | 2 | 1 | NC | NC |
| 69 | 193 | GGTAGAAAGATGGTGAGAAT | 2 | 2 | NC | NC |
| 70 | 194 | AGGTAGAAAGATGGTGAGAA | 2 | 1 | NC | NC |
| 71 | 195 | TAGGTAGAAAGATGGTGAGA | 2 | 2 | NC | NC |
| 72 | 196 | GTAGGTAGAAAGATGGTGAG | 2 | 2 | NC | NC |
| 73 | 197 | GGTAGGTAGAAAGATGGTGA | 2 | 2 | NC | NC |
| 74 | 198 | TGGTAGGTAGAAAGATGGTG | 2 | 2 | NC | NC |
| 75 | 199 | ATGGTAGGTAGAAAGATGGT | 2 | 2 | NC | NC |
| 76 | 200 | CATGGTAGGTAGAAAGATGG | 2 | 2 | NC | NC |
| 77 | 201 | TCATGGTAGGTAGAAAGATG | 2 | 2 | NC | NC |
| 78 | 202 | ATCATGGTAGGTAGAAAGAT | 1 | 2 | NC | NC |
| 79 | 203 | GATCATGGTAGGTAGAAAGA | 2 | 2 | NC | NC |
| 80 | 204 | TGATCATGGTAGGTAGAAAG | 2 | 2 | NC | NC |
| 81 | 205 | TTGATCATGGTAGGTAGAAA | 2 | 2 | NC | NC |
| 82 | 206 | CTTGATCATGGTAGGTAGAA | 2 | 2 | NC | NC |
| 83 | 207 | ACTTGATCATGGTAGGTAGA | 2 | 2 | NC | NC |
| 84 | 208 | CACTTGATCATGGTAGGTAG | 2 | 2 | NC | NC |
| 85 | 209 | GCACTTGATCATGGTAGGTA | 2 | 2 | NC | NC |
| 86 | 210 | AGCACTTGATCATGGTAGGT | 2 | 2 | NC | NC |
| 87 | 211 | AAGCACTTGATCATGGTAGG | 2 | 2 | NC | NC |
| 88 | 223 | ACTTCAACTGACAAGCACTT | 2 | 2 | NC | NC |
| 89 | 224 | TACTTCAACTGACAAGCACT | 2 | 2 | NC | NC |
| 90 | 225 | GTACTTCAACTGACAAGCAC | 2 | 2 | NC | NC |
| 91 | 226 | TGTACTTCAACTGACAAGCA | 1 | 2 | NC | NC |
| 92 | 227 | TTGTACTTCAACTGACAAGC | 2 | 2 | NC | NC |
| 93 | 229 | GCTTGTACTTCAACTGACAA | 2 | 2 | NC | NC |
| 94 | 230 | GGCTTGTACTTCAACTGACA | 2 | 2 | NC | NC |
| 95 | 231 | TGGCTTGTACTTCAACTGAC | 2 | 2 | NC | NC |
| 96 | 232 | TTGGCTTGTACTTCAACTGA | 2 | 2 | NC | NC |
| 97 | 233 | TTTGGCTTGTACTTCAACTG | 2 | 2 | NC | NC |
| 98 | 234 | ATTTGGCTTGTACTTCAACT | 2 | 2 | NC | NC |
| 99 | 235 | AATTTGGCTTGTACTTCAAC | 2 | 2 | NC | NC |
| 100 | 236 | CAATTTGGCTTGTACTTCAA | 2 | 2 | NC | NC |
| 101 | 237 | GCAATTTGGCTTGTACTTCA | 2 | 2 | NC | NC |
| 102 | 238 | CGCAATTTGGCTTGTACTTC | 2 | 3 | NC | NC |
| 103 | 239 | ACGCAATTTGGCTTGTACTT | 2 | 3 | NC | NC |
| 104 | 240 | AACGCAATTTGGCTTGTACT | 2 | 3 | NC | NC |
| 105 | 241 | GAACGCAATTTGGCTTGTAC | 2 | 2 | NC | NC |
| 106 | 242 | AGAACGCAATTTGGCTTGTA | 2 | 2 | NC | NC |
| 107 | 243 | CAGAACGCAATTTGGCTTGT | 3 | 2 | NC | NC |
| 108 | 244 | CCAGAACGCAATTTGGCTTG | 3 | 3 | NC | NC |
| 109 | 245 | ACCAGAACGCAATTTGGCTT | 3 | 2 | NC | NC |
| 110 | 246 | AACCAGAACGCAATTTGGCT | 2 | 2 | NC | NC |
| 111 | 247 | AAACCAGAACGCAATTTGGC | 2 | 2 | NC | NC |
| 112 | 249 | CCAAACCAGAACGCAATTTG | 2 | 3 | NC | NC |
| 113 | 250 | GCCAAACCAGAACGCAATTT | 2 | 2 | NC | NC |
| 114 | 269 | TTGGCCCAAGGAGCTTATGG | 1 | 2 | NC | NC |
| 115 | 270 | ATTGGCCCAAGGAGCTTATG | 2 | 2 | NC | NC |
| 116 | 271 | CATTGGCCCAAGGAGCTTAT | 2 | 3 | NC | NC |
| 117 | 272 | ACATTGGCCCAAGGAGCTTA | 2 | 3 | NC | NC |
| 118 | 273 | CACATTGGCCCAAGGAGCTT | 2 | 3 | NC | NC |
| 119 | 274 | ACACATTGGCCCAAGGAGCT | 1 | 2 | NC | NC |
| 120 | 275 | AACACATTGGCCCAAGGAGC | 2 | 2 | NC | NC |
| 121 | 276 | CAACACATTGGCCCAAGGAG | 2 | 2 | NC | NC |
| 122 | 277 | TCAACACATTGGCCCAAGGA | 2 | 2 | NC | NC |
| 123 | 278 | CTCAACACATTGGCCCAAGG | 2 | 2 | NC | NC |
| 124 | 279 | CCTCAACACATTGGCCCAAG | 2 | 2 | NC | NC |
| 125 | 280 | TCCTCAACACATTGGCCCAA | 1 | 1 | NC | NC |
| 126 | 281 | TTCCTCAACACATTGGCCCA | 1 | 1 | NC | NC |
| 127 | 282 | GTTCCTCAACACATTGGCCC | 2 | 2 | NC | NC |
| 128 | 283 | AGTTCCTCAACACATTGGCC | 2 | 1 | NC | NC |
| 129 | 284 | AAGTTCCTCAACACATTGGC | 2 | 2 | NC | NC |
| 130 | 285 | CAAGTTCCTCAACACATTGG | 2 | 2 | NC | NC |
| 131 | 286 | GCAAGTTCCTCAACACATTG | 2 | 2 | NC | NC |
| 132 | 287 | GGCAAGTTCCTCAACACATT | 2 | 2 | NC | NC |
| 133 | 288 | GGGCAAGTTCCTCAACACAT | 2 | 2 | NC | NC |
| 134 | 289 | AGGGCAAGTTCCTCAACACA | 2 | 2 | NC | NC |
| 135 | 296 | ACTGTTGAGGGCAAGTTCCT | 2 | 2 | NC | NC |
| 136 | 297 | TACTGTTGAGGGCAAGTTCC | 2 | 2 | NC | NC |
| 137 | 298 | ATACTGTTGAGGGCAAGTTC | 2 | 2 | NC | NC |
| 138 | 299 | AATACTGTTGAGGGCAAGTT | 2 | 1 | NC | NC |
| 139 | 300 | CAATACTGTTGAGGGCAAGT | 2 | 2 | NC | NC |
| 140 | 301 | TCAATACTGTTGAGGGCAAG | 2 | 2 | NC | NC |
| 141 | 302 | ATCAATACTGTTGAGGGCAA | 1 | 1 | NC | NC |
| 142 | 303 | CATCAATACTGTTGAGGGCA | 2 | 2 | NC | NC |
| 143 | 304 | GCATCAATACTGTTGAGGGC | 2 | 2 | NC | NC |
| 144 | 305 | AGCATCAATACTGTTGAGGG | 2 | 2 | NC | NC |
| 145 | 306 | CAGCATCAATACTGTTGAGG | 2 | 2 | NC | NC |
| 146 | 307 | TCAGCATCAATACTGTTGAG | 2 | 2 | NC | NC |
| 147 | 308 | TTCAGCATCAATACTGTTGA | 2 | 2 | NC | NC |
| 148 | 309 | CTTCAGCATCAATACTGTTG | 2 | 2 | NC | NC |
| 149 | 323 | AGCCACACATTTTGCTTCAG | 1 | 2 | NC | NC |
| 150 | 324 | CAGCCACACATTTTGCTTCA | 2 | 2 | NC | NC |
| 151 | 325 | ACAGCCACACATTTTGCTTC | 2 | 2 | NC | NC |
| 152 | 326 | GACAGCCACACATTTTGCTT | 2 | 2 | NC | NC |
| 153 | 327 | TGACAGCCACACATTTTGCT | 1 | 2 | NC | NC |
| 154 | 328 | CTGACAGCCACACATTTTGC | 2 | 2 | NC | NC |
| 155 | 329 | CCTGACAGCCACACATTTTG | 1 | 1 | NC | NC |
| 156 | 330 | CCCTGACAGCCACACATTTT | 1 | 2 | NC | NC |
| 157 | 331 | ACCCTGACAGCCACACATTT | 1 | 1 | NC | NC |
| 158 | 332 | CACCCTGACAGCCACACATT | 1 | 1 | NC | NC |
| 159 | 333 | TCACCCTGACAGCCACACAT | 1 | 1 | NC | NC |
| 160 | 334 | TTCACCCTGACAGCCACACA | 2 | 1 | NC | NC |
| 161 | 335 | ATTCACCCTGACAGCCACAC | 2 | 2 | NC | NC |
| 162 | 336 | TATTCACCCTGACAGCCACA | 2 | 2 | NC | NC |
| 163 | 337 | ATATTCACCCTGACAGCCAC | 2 | 2 | NC | NC |
| 164 | 338 | CATATTCACCCTGACAGCCA | 2 | 2 | NC | NC |
| 165 | 339 | CCATATTCACCCTGACAGCC | 1 | 2 | NC | NC |
| 166 | 340 | TCCATATTCACCCTGACAGC | 2 | 2 | NC | NC |
| 167 | 341 | TTCCATATTCACCCTGACAG | 2 | 2 | NC | NC |
| 168 | 342 | TTTCCATATTCACCCTGACA | 2 | 2 | NC | NC |
| 169 | 343 | GTTTCCATATTCACCCTGAC | 2 | 2 | NC | NC |
| 170 | 344 | GGTTTCCATATTCACCCTGA | 2 | 2 | NC | NC |
| 171 | 345 | AGGTTTCCATATTCACCCTG | 2 | 2 | NC | NC |
| 172 | 346 | AAGGTTTCCATATTCACCCT | 2 | 2 | NC | NC |
| 173 | 347 | GAAGGTTTCCATATTCACCC | 2 | 2 | NC | NC |
| 174 | 358 | ACTTGAACTTGGAAGGTTTC | 2 | 2 | 2 | 2 |
| 175 | 359 | CACTTGAACTTGGAAGGTTT | 2 | 2 | 2 | 1 |
| 176 | 360 | TCACTTGAACTTGGAAGGTT | 1 | 1 | 1 | 2 |
| 177 | 361 | ATCACTTGAACTTGGAAGGT | 0 | 0 | 1 | 2 |
| 178 | 362 | TATCACTTGAACTTGGAAGG | 1 | 1 | 2 | 3 |
| 179 | 363 | CTATCACTTGAACTTGGAAG | 2 | 2 | 1 | 2 |
| 180 | 364 | TCTATCACTTGAACTTGGAA | 2 | 1 | 1 | 2 |
| 181 | 365 | GTCTATCACTTGAACTTGGA | 2 | 1 | 1 | 2 |
| 182 | 366 | TGTCTATCACTTGAACTTGG | 2 | 2 | 1 | 1 |
| 183 | 367 | TTGTCTATCACTTGAACTTG | 2 | 2 | 2 | 2 |
| 184 | 368 | ATTGTCTATCACTTGAACTT | 2 | 2 | 2 | NC |
| 185 | 369 | CATTGTCTATCACTTGAACT | 2 | 2 | 2 | NC |
| 186 | 370 | CCATTGTCTATCACTTGAAC | 2 | 2 | 2 | NC |
| 187 | 371 | TCCATTGTCTATCACTTGAA | 2 | 2 | 2 | NC |
| 188 | 372 | ATCCATTGTCTATCACTTGA | 2 | 2 | NC | NC |
| 189 | 373 | AATCCATTGTCTATCACTTG | 2 | 2 | NC | NC |
| 190 | 374 | AAATCCATTGTCTATCACTT | 1 | 1 | NC | NC |
| 191 | 375 | CAAATCCATTGTCTATCACT | 2 | 2 | NC | NC |
| 192 | 376 | CCAAATCCATTGTCTATCAC | 2 | 2 | NC | NC |
| 193 | 377 | CCCAAATCCATTGTCTATCA | 2 | 2 | NC | NC |
| 194 | 378 | TCCCAAATCCATTGTCTATC | 2 | 2 | NC | NC |
| 195 | 379 | ATCCCAAATCCATTGTCTAT | 2 | 2 | NC | NC |
| 196 | 380 | CATCCCAAATCCATTGTCTA | 2 | 2 | NC | NC |
| 197 | 381 | CCATCCCAAATCCATTGTCT | 1 | 1 | NC | NC |
| 198 | 382 | CCCATCCCAAATCCATTGTC | 1 | 1 | NC | NC |
| 199 | 383 | CCCCATCCCAAATCCATTGT | 1 | 2 | NC | NC |
| 200 | 385 | CTCCCCATCCCAAATCCATT | 1 | 1 | NC | NC |
| 201 | 386 | ACTCCCCATCCCAAATCCAT | 2 | 2 | NC | NC |
| 202 | 387 | CACTCCCCATCCCAAATCCA | 1 | 2 | NC | NC |
| 203 | 388 | TCACTCCCCATCCCAAATCC | 1 | 2 | NC | NC |
| 204 | 389 | ATCACTCCCCATCCCAAATC | 1 | 1 | NC | NC |
| 205 | 390 | CATCACTCCCCATCCCAAAT | 2 | 2 | NC | NC |
| 206 | 391 | TCATCACTCCCCATCCCAAA | 2 | 2 | NC | NC |
| 207 | 392 | ATCATCACTCCCCATCCCAA | 2 | 2 | NC | NC |
| 208 | 393 | CATCATCACTCCCCATCCCA | 2 | 2 | NC | NC |
| 209 | 394 | ACATCATCACTCCCCATCCC | 1 | 2 | NC | NC |
| 210 | 395 | TACATCATCACTCCCCATCC | 1 | 2 | NC | NC |
| 211 | 396 | CTACATCATCACTCCCCATC | 2 | 2 | NC | NC |
| 212 | 397 | TCTACATCATCACTCCCCAT | 2 | 2 | NC | NC |
| 213 | 398 | CTCTACATCATCACTCCCCA | 2 | 1 | NC | NC |
| 214 | 399 | TCTCTACATCATCACTCCCC | 2 | 1 | NC | NC |
| 215 | 400 | TTCTCTACATCATCACTCCC | 2 | 1 | NC | NC |
| 216 | 401 | TTTCTCTACATCATCACTCC | 2 | 2 | NC | NC |
| 217 | 402 | CTTTCTCTACATCATCACTC | 2 | 2 | NC | NC |
| 218 | 403 | ACTTTCTCTACATCATCACT | 2 | 1 | NC | NC |
| 219 | 404 | CACTTTCTCTACATCATCAC | 1 | 1 | NC | NC |
| 220 | 405 | CCACTTTCTCTACATCATCA | 1 | 1 | NC | NC |
| 221 | 406 | CCCACTTTCTCTACATCATC | 1 | 2 | NC | NC |
| 222 | 407 | TCCCACTTTCTCTACATCAT | 1 | 2 | NC | NC |
| 223 | 408 | TTCCCACTTTCTCTACATCA | 2 | 2 | NC | NC |
| 224 | 409 | TTTCCCACTTTCTCTACATC | 2 | 2 | NC | NC |
| 225 | 410 | ATTTCCCACTTTCTCTACAT | 1 | 1 | NC | NC |
| 226 | 411 | GATTTCCCACTTTCTCTACA | 1 | 2 | NC | NC |
| 227 | 412 | CGATTTCCCACTTTCTCTAC | 2 | 2 | NC | NC |
| 228 | 413 | ACGATTTCCCACTTTCTCTA | 2 | 2 | NC | NC |
| 229 | 414 | AACGATTTCCCACTTTCTCT | 2 | 2 | NC | NC |
| 230 | 415 | TAACGATTTCCCACTTTCTC | 2 | 2 | NC | NC |
| 231 | 416 | ATAACGATTTCCCACTTTCT | 2 | 2 | NC | NC |
| 232 | 417 | AATAACGATTTCCCACTTTC | 2 | 2 | NC | NC |
| 233 | 418 | AAATAACGATTTCCCACTTT | 2 | 2 | NC | NC |
| 234 | 426 | TACTGGTGAAATAACGATTT | 2 | 3 | NC | NC |
| 235 | 427 | TTACTGGTGAAATAACGATT | 2 | 2 | NC | NC |
| 236 | 428 | TTTACTGGTGAAATAACGAT | 2 | 2 | NC | NC |
| 237 | 429 | ATTTACTGGTGAAATAACGA | 2 | 2 | NC | NC |
| 238 | 430 | CATTTACTGGTGAAATAACG | 2 | 2 | NC | NC |
| 239 | 431 | GCATTTACTGGTGAAATAAC | 1 | 2 | NC | NC |
| 240 | 432 | GGCATTTACTGGTGAAATAA | 2 | 2 | NC | NC |
| 241 | 433 | TGGCATTTACTGGTGAAATA | 2 | 2 | NC | NC |
| 242 | 434 | GTGGCATTTACTGGTGAAAT | 2 | 1 | NC | NC |
| 243 | 435 | AGTGGCATTTACTGGTGAAA | 2 | 2 | NC | NC |
| 244 | 436 | GAGTGGCATTTACTGGTGAA | 2 | 2 | NC | NC |
| 245 | 437 | CGAGTGGCATTTACTGGTGA | 2 | 2 | NC | NC |
| 246 | 438 | CCGAGTGGCATTTACTGGTG | 3 | 3 | NC | NC |
| 247 | 451 | TCCAAGTCCTGTACCGAGTG | 2 | 2 | NC | NC |
| 248 | 452 | CTCCAAGTCCTGTACCGAGT | 3 | 3 | NC | NC |
| 249 | 453 | TCTCCAAGTCCTGTACCGAG | 3 | 3 | NC | NC |
| 250 | 454 | TTCTCCAAGTCCTGTACCGA | 2 | 3 | NC | NC |
| 251 | 455 | ATTCTCCAAGTCCTGTACCG | 2 | 3 | NC | NC |
| 252 | 456 | GATTCTCCAAGTCCTGTACC | 2 | 2 | NC | NC |
| 253 | 457 | GGATTCTCCAAGTCCTGTAC | 1 | 2 | NC | NC |
| 254 | 468 | CATAAAACCTTGGATTCTCC | 2 | 1 | NC | NC |
| 255 | 469 | CCATAAAACCTTGGATTCTC | 2 | 2 | NC | NC |
| 256 | 470 | ACCATAAAACCTTGGATTCT | 1 | 2 | NC | NC |
| 257 | 471 | AACCATAAAACCTTGGATTC | 2 | 2 | NC | NC |
| 258 | 472 | AAACCATAAAACCTTGGATT | 2 | 2 | NC | NC |
| 259 | 473 | GAAACCATAAAACCTTGGAT | 2 | 2 | NC | NC |
| 260 | 474 | GGAAACCATAAAACCTTGGA | 2 | 2 | NC | NC |
| 261 | 476 | TCGGAAACCATAAAACCTTG | 2 | 3 | NC | NC |
| 262 | 477 | CTCGGAAACCATAAAACCTT | 3 | 3 | NC | NC |
| 263 | 478 | CCTCGGAAACCATAAAACCT | 2 | 2 | NC | NC |
| 264 | 479 | TCCTCGGAAACCATAAAACC | 2 | 2 | NC | NC |
| 265 | 480 | CTCCTCGGAAACCATAAAAC | 2 | 2 | NC | NC |
| 266 | 481 | TCTCCTCGGAAACCATAAAA | 2 | 2 | NC | NC |
| 267 | 482 | CTCTCCTCGGAAACCATAAA | 2 | 2 | NC | NC |
| 268 | 483 | CCTCTCCTCGGAAACCATAA | 2 | 2 | NC | NC |
| 269 | 484 | GCCTCTCCTCGGAAACCATA | 2 | 1 | NC | NC |
| 270 | 509 | GGCCATGTCAGCAATATTTG | 2 | NC | NC | NC |
| 271 | 510 | TGGCCATGTCAGCAATATTT | 1 | NC | NC | NC |
| 272 | 511 | CTGGCCATGTCAGCAATATT | 2 | NC | NC | NC |
| 273 | 512 | ACTGGCCATGTCAGCAATAT | 2 | NC | NC | NC |
| 274 | 513 | CACTGGCCATGTCAGCAATA | 2 | NC | NC | NC |
| 275 | 514 | GCACTGGCCATGTCAGCAAT | 2 | NC | NC | NC |
| 276 | 515 | AGCACTGGCCATGTCAGCAA | 1 | NC | NC | NC |
| 277 | 527 | CGAAATTTCCACAGCACTGG | 2 | NC | NC | NC |
| 278 | 528 | ACGAAATTTCCACAGCACTG | 2 | NC | NC | NC |
| 279 | 529 | GACGAAATTTCCACAGCACT | 2 | NC | NC | NC |
| 280 | 530 | GGACGAAATTTCCACAGCAC | 2 | NC | NC | NC |
| 281 | 531 | TGGACGAAATTTCCACAGCA | 2 | NC | NC | NC |
| 282 | 537 | TTTTCTTGGACGAAATTTCC | 2 | 2 | NC | NC |
| 283 | 538 | TTTTTCTTGGACGAAATTTC | 2 | 1 | NC | NC |
| 284 | 539 | GTTTTTCTTGGACGAAATTT | 2 | 2 | NC | NC |
| 285 | 540 | TGTTTTTCTTGGACGAAATT | 2 | 2 | NC | NC |
| 286 | 541 | CTGTTTTTCTTGGACGAAAT | 2 | 2 | NC | NC |
| 287 | 542 | CCTGTTTTTCTTGGACGAAA | 3 | 1 | NC | NC |
| 288 | 543 | TCCTGTTTTTCTTGGACGAA | 2 | 2 | NC | NC |
| 289 | 547 | ATTGTCCTGTTTTTCTTGGA | 1 | 2 | NC | NC |
| 290 | 548 | CATTGTCCTGTTTTTCTTGG | 1 | 2 | NC | NC |
| 291 | 549 | TCATTGTCCTGTTTTTCTTG | 1 | 1 | NC | NC |
| 292 | 550 | TTCATTGTCCTGTTTTTCTT | 0 | 2 | NC | NC |
| 293 | 551 | TTTCATTGTCCTGTTTTTCT | 1 | 1 | NC | NC |
| 294 | 552 | TTTTCATTGTCCTGTTTTTC | 2 | 1 | NC | NC |
| 295 | 553 | GTTTTCATTGTCCTGTTTTT | 1 | 2 | NC | NC |
| 296 | 554 | AGTTTTCATTGTCCTGTTTT | 2 | 1 | NC | NC |
| 297 | 555 | AAGTTTTCATTGTCCTGTTT | 2 | 1 | NC | NC |
| 298 | 556 | AAAGTTTTCATTGTCCTGTT | 2 | 2 | NC | NC |
| 299 | 557 | AAAAGTTTTCATTGTCCTGT | 2 | 2 | NC | NC |
| 300 | 558 | CAAAAGTTTTCATTGTCCTG | 2 | 2 | NC | NC |
| 301 | 559 | ACAAAAGTTTTCATTGTCCT | 2 | 2 | NC | NC |
| 302 | 560 | CACAAAAGTTTTCATTGTCC | 2 | 2 | NC | NC |
| 303 | 561 | TCACAAAAGTTTTCATTGTC | 1 | 1 | NC | NC |
| 304 | 562 | TTCACAAAAGTTTTCATTGT | 1 | 1 | NC | NC |
| 305 | 563 | TTTCACAAAAGTTTTCATTG | 2 | 1 | NC | NC |
| 306 | 564 | GTTTCACAAAAGTTTTCATT | 2 | 2 | NC | NC |
| 307 | 565 | AGTTTCACAAAAGTTTTCAT | 1 | 2 | NC | NC |
| 308 | 566 | CAGTTTCACAAAAGTTTTCA | 1 | 1 | NC | NC |
| 309 | 567 | ACAGTTTCACAAAAGTTTTC | 2 | 2 | NC | NC |
| 310 | 568 | AACAGTTTCACAAAAGTTTT | 1 | 1 | NC | NC |
| 311 | 569 | AAACAGTTTCACAAAAGTTT | 2 | 2 | NC | NC |
| 312 | 580 | TTTCCACTCTGAAACAGTTT | 1 | 2 | NC | NC |
| 313 | 581 | TTTTCCACTCTGAAACAGTT | 1 | 2 | NC | NC |
| 314 | 582 | CTTTTCCACTCTGAAACAGT | 2 | 2 | NC | NC |
| 315 | 583 | GCTTTTCCACTCTGAAACAG | 2 | 2 | NC | NC |
| 316 | 584 | GGCTTTTCCACTCTGAAACA | 2 | 1 | NC | NC |
| 317 | 585 | GGGCTTTTCCACTCTGAAAC | 2 | 2 | NC | NC |
| 318 | 586 | AGGGCTTTTCCACTCTGAAA | 2 | 2 | NC | NC |
| 319 | 587 | CAGGGCTTTTCCACTCTGAA | 2 | 2 | NC | NC |
| 320 | 588 | TCAGGGCTTTTCCACTCTGA | 2 | 2 | NC | NC |
| 321 | 589 | TTCAGGGCTTTTCCACTCTG | 2 | 2 | NC | NC |
| 322 | 590 | TTTCAGGGCTTTTCCACTCT | 2 | 1 | NC | NC |
| 323 | 591 | CTTTCAGGGCTTTTCCACTC | 1 | 1 | NC | NC |
| 324 | 592 | GCTTTCAGGGCTTTTCCACT | 1 | 1 | NC | NC |
| 325 | 593 | AGCTTTCAGGGCTTTTCCAC | 1 | 2 | NC | NC |
| 326 | 611 | AGTCACATCAGCTTCACAAG | 2 | 2 | NC | NC |
| 327 | 612 | TAGTCACATCAGCTTCACAA | 2 | 2 | NC | NC |
| 328 | 613 | CTAGTCACATCAGCTTCACA | 3 | 3 | NC | NC |
| 329 | 614 | TCTAGTCACATCAGCTTCAC | 2 | 2 | NC | NC |
| 330 | 615 | CTCTAGTCACATCAGCTTCA | 2 | NC | NC | NC |
| 331 | 616 | GCTCTAGTCACATCAGCTTC | 2 | NC | NC | NC |
| 332 | 617 | TGCTCTAGTCACATCAGCTT | 2 | NC | NC | NC |
| 333 | 618 | TTGCTCTAGTCACATCAGCT | 2 | NC | NC | NC |
| 334 | 619 | CTTGCTCTAGTCACATCAGC | 2 | NC | NC | NC |
| 335 | 620 | GCTTGCTCTAGTCACATCAG | 2 | NC | NC | NC |
| 336 | 621 | CGCTTGCTCTAGTCACATCA | 2 | NC | NC | NC |
| 337 | 622 | GCGCTTGCTCTAGTCACATC | 2 | NC | NC | NC |
| 338 | 635 | TACAGTAGTCCCAGCGCTTG | 2 | NC | NC | NC |
| 339 | 636 | TTACAGTAGTCCCAGCGCTT | 2 | NC | NC | NC |
| 340 | 637 | GTTACAGTAGTCCCAGCGCT | 3 | NC | NC | NC |
| 341 | 638 | TGTTACAGTAGTCCCAGCGC | 2 | NC | NC | NC |
| 342 | 639 | CTGTTACAGTAGTCCCAGCG | 2 | NC | NC | NC |
| 343 | 651 | ATAGGTTATACACTGTTACA | 1 | 2 | NC | NC |
| 344 | 652 | AATAGGTTATACACTGTTAC | 2 | 2 | NC | NC |
| 345 | 653 | AAATAGGTTATACACTGTTA | 1 | 1 | NC | NC |
| 346 | 654 | AAAATAGGTTATACACTGTT | 2 | 1 | NC | NC |
| 347 | 655 | TAAAATAGGTTATACACTGT | 1 | 1 | NC | NC |
| 348 | 656 | GTAAAATAGGTTATACACTG | 2 | 2 | NC | NC |
| 349 | 657 | GGTAAAATAGGTTATACACT | 1 | 1 | NC | NC |
| 350 | 658 | TGGTAAAATAGGTTATACAC | 2 | 2 | NC | NC |
| 351 | 659 | CTGGTAAAATAGGTTATACA | 2 | 2 | NC | NC |
| 352 | 660 | GCTGGTAAAATAGGTTATAC | 2 | 2 | NC | NC |
| 353 | 661 | AGCTGGTAAAATAGGTTATA | 2 | 2 | NC | NC |
| 354 | 662 | AAGCTGGTAAAATAGGTTAT | 1 | NC | NC | NC |
| 355 | 663 | GAAGCTGGTAAAATAGGTTA | 1 | NC | NC | NC |
| 356 | 664 | GGAAGCTGGTAAAATAGGTT | 1 | NC | NC | NC |
| 357 | 665 | AGGAAGCTGGTAAAATAGGT | 1 | NC | NC | NC |
| 358 | 666 | CAGGAAGCTGGTAAAATAGG | 1 | NC | NC | NC |
| 359 | 667 | ACAGGAAGCTGGTAAAATAG | 2 | NC | NC | NC |
| 360 | 668 | TACAGGAAGCTGGTAAAATA | 2 | NC | NC | NC |
| 361 | 669 | TTACAGGAAGCTGGTAAAAT | 2 | NC | NC | NC |
| 362 | 670 | CTTACAGGAAGCTGGTAAAA | 2 | NC | NC | NC |
| 363 | 671 | CCTTACAGGAAGCTGGTAAA | 2 | NC | NC | NC |
| 364 | 682 | ATGCATTTCCTCCTTACAGG | 2 | 2 | NC | NC |
| 365 | 683 | CATGCATTTCCTCCTTACAG | 2 | 2 | NC | NC |
| 366 | 684 | CCATGCATTTCCTCCTTACA | 2 | 2 | NC | NC |
| 367 | 685 | TCCATGCATTTCCTCCTTAC | 2 | 2 | NC | NC |
| 368 | 686 | GTCCATGCATTTCCTCCTTA | 2 | 2 | NC | NC |
| 369 | 687 | GGTCCATGCATTTCCTCCTT | 1 | 1 | NC | NC |
| 370 | 688 | GGGTCCATGCATTTCCTCCT | 2 | 2 | NC | NC |
| 371 | 689 | AGGGTCCATGCATTTCCTCC | 1 | 1 | NC | NC |
| 372 | 690 | TAGGGTCCATGCATTTCCTC | 2 | 2 | NC | NC |
| 373 | 691 | CTAGGGTCCATGCATTTCCT | 3 | 3 | NC | NC |
| 374 | 692 | TCTAGGGTCCATGCATTTCC | 2 | 2 | NC | NC |
| 375 | 693 | GTCTAGGGTCCATGCATTTC | 2 | 3 | NC | NC |
| 376 | 694 | AGTCTAGGGTCCATGCATTT | 2 | 2 | NC | NC |
| 377 | 695 | CAGTCTAGGGTCCATGCATT | 2 | 3 | NC | NC |
| 378 | 696 | CCAGTCTAGGGTCCATGCAT | 2 | 2 | NC | NC |
| 379 | 697 | TCCAGTCTAGGGTCCATGCA | 2 | 2 | NC | NC |
| 380 | 699 | ACTCCAGTCTAGGGTCCATG | 1 | 2 | NC | NC |
| 381 | 700 | AACTCCAGTCTAGGGTCCAT | 2 | 2 | NC | NC |
| 382 | 701 | AAACTCCAGTCTAGGGTCCA | 2 | 2 | NC | NC |
| 383 | 702 | CAAACTCCAGTCTAGGGTCC | 2 | 2 | NC | NC |
| 384 | 703 | TCAAACTCCAGTCTAGGGTC | 2 | 2 | NC | NC |
| 385 | 704 | CTCAAACTCCAGTCTAGGGT | 2 | 2 | NC | NC |
| 386 | 705 | TCTCAAACTCCAGTCTAGGG | 2 | 2 | NC | NC |
| 387 | 706 | TTCTCAAACTCCAGTCTAGG | 2 | 2 | NC | NC |
| 388 | 707 | CTTCTCAAACTCCAGTCTAG | 2 | 2 | NC | NC |
| 389 | 708 | CCTTCTCAAACTCCAGTCTA | 2 | 2 | NC | NC |
| 390 | 709 | ACCTTCTCAAACTCCAGTCT | 2 | 2 | NC | NC |
| 391 | 710 | AACCTTCTCAAACTCCAGTC | 2 | 2 | NC | NC |
| 392 | 711 | TAACCTTCTCAAACTCCAGT | 2 | 1 | NC | NC |
| 393 | 712 | CTAACCTTCTCAAACTCCAG | 2 | 2 | NC | NC |
| 394 | 713 | CCTAACCTTCTCAAACTCCA | 2 | 1 | NC | NC |
| 395 | 714 | GCCTAACCTTCTCAAACTCC | 2 | 2 | NC | NC |
| 396 | 715 | TGCCTAACCTTCTCAAACTC | 2 | 2 | NC | NC |
| 397 | 716 | CTGCCTAACCTTCTCAAACT | 2 | 1 | NC | NC |
| 398 | 717 | TCTGCCTAACCTTCTCAAAC | 2 | 1 | NC | NC |
| 399 | 718 | CTCTGCCTAACCTTCTCAAA | 2 | 2 | NC | NC |
| 400 | 719 | TCTCTGCCTAACCTTCTCAA | 2 | NC | NC | NC |
| 401 | 720 | TTCTCTGCCTAACCTTCTCA | 2 | NC | NC | NC |
| 402 | 721 | ATTCTCTGCCTAACCTTCTC | 2 | NC | NC | NC |
| 403 | 722 | TATTCTCTGCCTAACCTTCT | 2 | NC | NC | NC |
| 404 | 723 | CTATTCTCTGCCTAACCTTC | 2 | NC | NC | NC |
| 405 | 724 | TCTATTCTCTGCCTAACCTT | 2 | NC | NC | NC |
| 406 | 725 | TTCTATTCTCTGCCTAACCT | 2 | NC | NC | NC |
| 407 | 726 | CTTCTATTCTCTGCCTAACC | 2 | NC | NC | NC |
| 408 | 727 | GCTTCTATTCTCTGCCTAAC | 1 | NC | NC | NC |
| 409 | 728 | AGCTTCTATTCTCTGCCTAA | 1 | NC | NC | NC |
| 410 | 729 | GAGCTTCTATTCTCTGCCTA | 2 | NC | NC | NC |
| 411 | 730 | AGAGCTTCTATTCTCTGCCT | 1 | NC | NC | NC |
| 412 | 731 | GAGAGCTTCTATTCTCTGCC | 2 | NC | NC | NC |
| 413 | 736 | AGTGAGAGAGCTTCTATTCT | 2 | NC | NC | NC |
| 414 | 737 | GAGTGAGAGAGCTTCTATTC | 2 | NC | NC | NC |
| 415 | 738 | TGAGTGAGAGAGCTTCTATT | 2 | NC | NC | NC |
| 416 | 739 | ATGAGTGAGAGAGCTTCTAT | 2 | NC | NC | NC |
| 417 | 740 | CATGAGTGAGAGAGCTTCTA | 2 | NC | NC | NC |
| 418 | 742 | TGCATGAGTGAGAGAGCTTC | 2 | NC | NC | NC |
| 419 | 743 | GTGCATGAGTGAGAGAGCTT | 1 | NC | NC | NC |
| 420 | 744 | GGTGCATGAGTGAGAGAGCT | 1 | NC | NC | NC |
| 421 | 746 | AGGGTGCATGAGTGAGAGAG | 2 | NC | NC | NC |
| 422 | 747 | AAGGGTGCATGAGTGAGAGA | 1 | NC | NC | NC |
| 423 | 748 | GAAGGGTGCATGAGTGAGAG | 1 | NC | NC | NC |
| 424 | 749 | GGAAGGGTGCATGAGTGAGA | 1 | NC | NC | NC |
| 425 | 750 | TGGAAGGGTGCATGAGTGAG | 2 | NC | NC | NC |
| 426 | 751 | ATGGAAGGGTGCATGAGTGA | 2 | NC | NC | NC |
| 427 | 752 | AATGGAAGGGTGCATGAGTG | 2 | NC | NC | NC |
| 428 | 753 | AAATGGAAGGGTGCATGAGT | 2 | NC | NC | NC |
| 429 | 754 | GAAATGGAAGGGTGCATGAG | 1 | NC | NC | NC |
| 430 | 755 | AGAAATGGAAGGGTGCATGA | 2 | NC | NC | NC |
| 431 | 756 | AAGAAATGGAAGGGTGCATG | 2 | NC | NC | NC |
| 432 | 757 | AAAGAAATGGAAGGGTGCAT | 2 | NC | NC | NC |
| 433 | 758 | GAAAGAAATGGAAGGGTGCA | 2 | NC | NC | NC |
| 434 | 759 | AGAAAGAAATGGAAGGGTGC | 2 | NC | NC | NC |
| 435 | 760 | GAGAAAGAAATGGAAGGGTG | 1 | NC | NC | NC |
| 436 | 761 | AGAGAAAGAAATGGAAGGGT | 1 | NC | NC | NC |
| 437 | 762 | AAGAGAAAGAAATGGAAGGG | 1 | NC | NC | NC |
| 438 | 763 | AAAGAGAAAGAAATGGAAGG | 0 | NC | NC | NC |
| 439 | 764 | CAAAGAGAAAGAAATGGAAG | 1 | NC | NC | NC |
| 440 | 765 | TCAAAGAGAAAGAAATGGAA | 1 | NC | NC | NC |
| 441 | 766 | CTCAAAGAGAAAGAAATGGA | 1 | NC | NC | NC |
| 442 | 767 | TCTCAAAGAGAAAGAAATGG | 2 | NC | NC | NC |
| 443 | 776 | AACATCATTTCTCAAAGAGA | 1 | 2 | NC | NC |
| 444 | 777 | AAACATCATTTCTCAAAGAG | 2 | 2 | NC | NC |
| 445 | 778 | GAAACATCATTTCTCAAAGA | 1 | 2 | NC | NC |
| 446 | 779 | AGAAACATCATTTCTCAAAG | 1 | 1 | NC | NC |
| 447 | 780 | CAGAAACATCATTTCTCAAA | 0 | 1 | NC | NC |
| 448 | 781 | CCAGAAACATCATTTCTCAA | 0 | 1 | NC | NC |
| 449 | 782 | ACCAGAAACATCATTTCTCA | 1 | 0 | NC | NC |
| 450 | 783 | AACCAGAAACATCATTTCTC | 1 | 1 | NC | NC |
| 451 | 785 | GGAACCAGAAACATCATTTC | 1 | 1 | NC | NC |
| 452 | 786 | TGGAACCAGAAACATCATTT | 1 | 1 | NC | NC |
| 453 | 787 | ATGGAACCAGAAACATCATT | 2 | 1 | NC | NC |
| 454 | 788 | CATGGAACCAGAAACATCAT | 2 | 2 | NC | NC |
| 455 | 789 | CCATGGAACCAGAAACATCA | 2 | 2 | NC | NC |
| 456 | 790 | ACCATGGAACCAGAAACATC | 2 | 2 | NC | NC |
| 457 | 791 | AACCATGGAACCAGAAACAT | 2 | 2 | NC | NC |
| 458 | 792 | GAACCATGGAACCAGAAACA | 1 | 2 | NC | NC |
| 459 | 793 | AGAACCATGGAACCAGAAAC | 2 | 2 | NC | NC |
| 460 | 794 | AAGAACCATGGAACCAGAAA | 2 | 1 | NC | NC |
| 461 | 795 | GAAGAACCATGGAACCAGAA | 2 | 2 | NC | NC |
| 462 | 796 | TGAAGAACCATGGAACCAGA | 1 | 1 | NC | NC |
| 463 | 797 | CTGAAGAACCATGGAACCAG | 2 | NC | NC | NC |
| 464 | 798 | GCTGAAGAACCATGGAACCA | 2 | NC | NC | NC |
| 465 | 799 | AGCTGAAGAACCATGGAACC | 2 | NC | NC | NC |
| 466 | 800 | GAGCTGAAGAACCATGGAAC | 2 | NC | NC | NC |
| 467 | 801 | GGAGCTGAAGAACCATGGAA | 2 | NC | NC | NC |
| 468 | 802 | GGGAGCTGAAGAACCATGGA | 2 | NC | NC | NC |
| 469 | 803 | AGGGAGCTGAAGAACCATGG | 2 | NC | NC | NC |
| 470 | 804 | TAGGGAGCTGAAGAACCATG | 2 | NC | NC | NC |
| 471 | 805 | TTAGGGAGCTGAAGAACCAT | 2 | NC | NC | NC |
| 472 | 806 | TTTAGGGAGCTGAAGAACCA | 2 | NC | NC | NC |
| 473 | 807 | TTTTAGGGAGCTGAAGAACC | 2 | NC | NC | NC |
| 474 | 808 | GTTTTAGGGAGCTGAAGAAC | 2 | NC | NC | NC |
| 475 | 809 | GGTTTTAGGGAGCTGAAGAA | 2 | NC | NC | NC |
| 476 | 810 | TGGTTTTAGGGAGCTGAAGA | 2 | NC | NC | NC |
| 477 | 811 | TTGGTTTTAGGGAGCTGAAG | 2 | NC | NC | NC |
| 478 | 812 | TTTGGTTTTAGGGAGCTGAA | 2 | NC | NC | NC |
| 479 | 813 | CTTTGGTTTTAGGGAGCTGA | 2 | NC | NC | NC |
| 480 | 814 | TCTTTGGTTTTAGGGAGCTG | 1 | NC | NC | NC |
| 481 | 815 | GTCTTTGGTTTTAGGGAGCT | 2 | NC | NC | NC |
| 482 | 816 | CGTCTTTGGTTTTAGGGAGC | 2 | NC | NC | NC |
| 483 | 817 | ACGTCTTTGGTTTTAGGGAG | 2 | 2 | NC | NC |
| 484 | 818 | TACGTCTTTGGTTTTAGGGA | 2 | 2 | NC | NC |
| 485 | 819 | ATACGTCTTTGGTTTTAGGG | 2 | 2 | NC | NC |
| 486 | 820 | CATACGTCTTTGGTTTTAGG | 2 | 2 | NC | NC |
| 487 | 821 | ACATACGTCTTTGGTTTTAG | 2 | 2 | NC | NC |
| 488 | 822 | AACATACGTCTTTGGTTTTA | 2 | 2 | NC | NC |
| 489 | 823 | GAACATACGTCTTTGGTTTT | 2 | 2 | NC | NC |
| 490 | 824 | GGAACATACGTCTTTGGTTT | 3 | 3 | NC | NC |
| 491 | 825 | GGGAACATACGTCTTTGGTT | 2 | 3 | NC | NC |
| 492 | 826 | CGGGAACATACGTCTTTGGT | 3 | 3 | NC | NC |
| 493 | 827 | TCGGGAACATACGTCTTTGG | 3 | 3 | NC | NC |
| 494 | 828 | ATCGGGAACATACGTCTTTG | 3 | 2 | NC | NC |
| 495 | 829 | AATCGGGAACATACGTCTTT | 2 | 2 | NC | NC |
| 496 | 830 | AAATCGGGAACATACGTCTT | 2 | 2 | NC | NC |
| 497 | 831 | AAAATCGGGAACATACGTCT | 3 | 2 | NC | NC |
| 498 | 832 | CAAAATCGGGAACATACGTC | 3 | 3 | NC | NC |
| 499 | 833 | ACAAAATCGGGAACATACGT | 3 | 3 | NC | NC |
| 500 | 834 | GACAAAATCGGGAACATACG | 3 | 3 | NC | NC |
| 501 | 835 | TGACAAAATCGGGAACATAC | 2 | 2 | NC | NC |
| 502 | 836 | TTGACAAAATCGGGAACATA | 2 | 2 | NC | NC |
| 503 | 837 | TTTGACAAAATCGGGAACAT | 2 | 2 | NC | NC |
| 504 | 838 | ATTTGACAAAATCGGGAACA | 2 | 2 | NC | NC |
| 505 | 839 | AATTTGACAAAATCGGGAAC | 2 | 2 | NC | NC |
| 506 | 840 | AAATTTGACAAAATCGGGAA | 2 | 2 | NC | NC |
| 507 | 841 | TAAATTTGACAAAATCGGGA | 2 | 2 | NC | NC |
| 508 | 842 | ATAAATTTGACAAAATCGGG | 2 | 2 | NC | NC |
| 509 | 843 | CATAAATTTGACAAAATCGG | 2 | 2 | NC | NC |
| 510 | 844 | CCATAAATTTGACAAAATCG | 2 | 2 | NC | NC |
| 511 | 845 | TCCATAAATTTGACAAAATC | 2 | 1 | NC | NC |
| 512 | 848 | CAATCCATAAATTTGACAAA | 1 | 2 | NC | NC |
| 513 | 849 | CCAATCCATAAATTTGACAA | 2 | 2 | NC | NC |
| 514 | 850 | CCCAATCCATAAATTTGACA | 2 | 2 | NC | NC |
| 515 | 851 | TCCCAATCCATAAATTTGAC | 2 | 2 | NC | NC |
| 516 | 852 | TTCCCAATCCATAAATTTGA | 2 | 1 | NC | NC |
| 517 | 853 | TTTCCCAATCCATAAATTTG | 2 | 1 | NC | NC |
| 518 | 854 | CTTTCCCAATCCATAAATTT | 1 | 1 | NC | NC |
| 519 | 855 | ACTTTCCCAATCCATAAATT | 1 | 2 | NC | NC |
| 520 | 856 | GACTTTCCCAATCCATAAAT | 2 | 2 | NC | NC |
| 521 | 857 | GGACTTTCCCAATCCATAAA | 2 | 2 | NC | NC |
| 522 | 868 | CTTAGCTTTTGGGACTTTCC | 2 | NC | NC | NC |
| 523 | 869 | TCTTAGCTTTTGGGACTTTC | 2 | NC | NC | NC |
| 524 | 870 | CTCTTAGCTTTTGGGACTTT | 2 | NC | NC | NC |
| 525 | 871 | TCTCTTAGCTTTTGGGACTT | 2 | NC | NC | NC |
| 526 | 872 | TTCTCTTAGCTTTTGGGACT | 2 | NC | NC | NC |
| 527 | 873 | TTTCTCTTAGCTTTTGGGAC | 2 | NC | NC | NC |
| 528 | 874 | ATTTCTCTTAGCTTTTGGGA | 2 | NC | NC | NC |
| 529 | 875 | TATTTCTCTTAGCTTTTGGG | 2 | NC | NC | NC |
| 530 | 876 | TTATTTCTCTTAGCTTTTGG | 2 | NC | NC | NC |
| 531 | 877 | CTTATTTCTCTTAGCTTTTG | 2 | NC | NC | NC |
| 532 | 878 | ACTTATTTCTCTTAGCTTTT | 2 | NC | NC | NC |
| 533 | 879 | AACTTATTTCTCTTAGCTTT | 1 | NC | NC | NC |
| 534 | 880 | AAACTTATTTCTCTTAGCTT | 1 | NC | NC | NC |
| 535 | 881 | AAAACTTATTTCTCTTAGCT | 2 | NC | NC | NC |
| 536 | 882 | TAAAACTTATTTCTCTTAGC | 2 | NC | NC | NC |
| 537 | 900 | GCTCAAACTCTTTATATTTA | 2 | NC | NC | NC |
| 538 | 901 | AGCTCAAACTCTTTATATTT | 1 | NC | NC | NC |
| 539 | 902 | AAGCTCAAACTCTTTATATT | 2 | NC | NC | NC |
| 540 | 903 | TAAGCTCAAACTCTTTATAT | 1 | NC | NC | NC |
| 541 | 904 | CTAAGCTCAAACTCTTTATA | 1 | NC | NC | NC |
| 542 | 905 | ACTAAGCTCAAACTCTTTAT | 2 | NC | NC | NC |
| 543 | 906 | CACTAAGCTCAAACTCTTTA | 2 | NC | NC | NC |
| 544 | 907 | CCACTAAGCTCAAACTCTTT | 2 | NC | NC | NC |
| 545 | 908 | GCCACTAAGCTCAAACTCTT | 2 | NC | NC | NC |
| 546 | 909 | AGCCACTAAGCTCAAACTCT | 2 | NC | NC | NC |
| 547 | 936 | TGTTGTAATGTGCTTCAGAG | 2 | NC | NC | NC |
| 548 | 937 | TTGTTGTAATGTGCTTCAGA | 2 | NC | NC | NC |
| 549 | 938 | CTTGTTGTAATGTGCTTCAG | 2 | NC | NC | NC |
| 550 | 939 | TCTTGTTGTAATGTGCTTCA | 2 | NC | NC | NC |
| 551 | 940 | TTCTTGTTGTAATGTGCTTC | 2 | NC | NC | NC |
| 552 | 941 | ATTCTTGTTGTAATGTGCTT | 2 | NC | NC | NC |
| 553 | 942 | TATTCTTGTTGTAATGTGCT | 2 | NC | NC | NC |
| 554 | 943 | ATATTCTTGTTGTAATGTGC | 1 | NC | NC | NC |
| 555 | 944 | CATATTCTTGTTGTAATGTG | 1 | NC | NC | NC |
| 556 | 945 | GCATATTCTTGTTGTAATGT | 1 | NC | NC | NC |
| 557 | 946 | TGCATATTCTTGTTGTAATG | 2 | NC | NC | NC |
| 558 | 947 | CTGCATATTCTTGTTGTAAT | 2 | NC | NC | NC |
| 559 | 948 | ACTGCATATTCTTGTTGTAA | 2 | NC | NC | NC |
| 560 | 949 | AACTGCATATTCTTGTTGTA | 2 | NC | NC | NC |
| 561 | 950 | AAACTGCATATTCTTGTTGT | 2 | NC | NC | NC |
| 562 | 951 | AAAACTGCATATTCTTGTTG | 2 | NC | NC | NC |
| 563 | 952 | AAAAACTGCATATTCTTGTT | 2 | NC | NC | NC |
| 564 | 953 | CAAAAACTGCATATTCTTGT | 1 | NC | NC | NC |
| 565 | 954 | ACAAAAACTGCATATTCTTG | 2 | NC | NC | NC |
| 566 | 955 | AACAAAAACTGCATATTCTT | 1 | 2 | 1 | 2 |
| 567 | 956 | AAACAAAAACTGCATATTCT | 1 | 1 | 1 | 2 |
| 568 | 957 | CAAACAAAAACTGCATATTC | 2 | 2 | 2 | 1 |
| 569 | 958 | ACAAACAAAAACTGCATATT | 1 | 1 | 1 | 2 |
| 570 | 959 | CACAAACAAAAACTGCATAT | 1 | 1 | 2 | 2 |
| 571 | 960 | TCACAAACAAAAACTGCATA | 0 | 1 | 2 | 2 |
| 572 | 961 | TTCACAAACAAAAACTGCAT | 0 | 2 | 2 | 2 |
| 573 | 962 | GTTCACAAACAAAAACTGCA | 1 | 2 | 1 | 2 |
| 574 | 974 | AACTAGTCTTTTGTTCACAA | 1 | NC | NC | NC |
| 575 | 975 | AAACTAGTCTTTTGTTCACA | 1 | NC | NC | NC |
| 576 | 976 | AAAACTAGTCTTTTGTTCAC | 1 | NC | NC | NC |
| 577 | 977 | TAAAACTAGTCTTTTGTTCA | 1 | NC | NC | NC |
| 578 | 978 | TTAAAACTAGTCTTTTGTTC | 1 | NC | NC | NC |
| 579 | 979 | CTTAAAACTAGTCTTTTGTT | 1 | NC | NC | NC |
| 580 | 980 | CCTTAAAACTAGTCTTTTGT | 2 | NC | NC | NC |
| 581 | 981 | TCCTTAAAACTAGTCTTTTG | 2 | NC | NC | NC |
| 582 | 982 | GTCCTTAAAACTAGTCTTTT | 2 | NC | NC | NC |
| 583 | 983 | TGTCCTTAAAACTAGTCTTT | 2 | NC | NC | NC |
| 584 | 984 | TTGTCCTTAAAACTAGTCTT | 2 | NC | NC | NC |
| 585 | 985 | TTTGTCCTTAAAACTAGTCT | 1 | NC | NC | NC |
| 586 | 986 | CTTTGTCCTTAAAACTAGTC | 2 | NC | NC | NC |
| 587 | 987 | GCTTTGTCCTTAAAACTAGT | 1 | NC | NC | NC |
| 588 | 988 | AGCTTTGTCCTTAAAACTAG | 2 | NC | NC | NC |
| 589 | 989 | TAGCTTTGTCCTTAAAACTA | 2 | NC | NC | NC |
| 590 | 990 | GTAGCTTTGTCCTTAAAACT | 2 | NC | NC | NC |
| 591 | 991 | TGTAGCTTTGTCCTTAAAAC | 2 | 2 | NC | NC |
| 592 | 992 | ATGTAGCTTTGTCCTTAAAA | 1 | 2 | NC | NC |
| 593 | 993 | TATGTAGCTTTGTCCTTAAA | 2 | 2 | NC | NC |
| 594 | 994 | TTATGTAGCTTTGTCCTTAA | 2 | 2 | NC | NC |
| 595 | 995 | TTTATGTAGCTTTGTCCTTA | 1 | 2 | NC | NC |
| 596 | 996 | GTTTATGTAGCTTTGTCCTT | 2 | 2 | NC | NC |
| 597 | 997 | AGTTTATGTAGCTTTGTCCT | 3 | 2 | NC | NC |
| 598 | 998 | GAGTTTATGTAGCTTTGTCC | 2 | 2 | NC | NC |
| 599 | 999 | TGAGTTTATGTAGCTTTGTC | 2 | 2 | NC | NC |
| 600 | 1000 | ATGAGTTTATGTAGCTTTGT | 2 | 1 | NC | NC |
| 601 | 1001 | AATGAGTTTATGTAGCTTTG | 1 | 1 | NC | NC |
| 602 | 1002 | CAATGAGTTTATGTAGCTTT | 2 | 2 | NC | NC |
| 603 | 1003 | TCAATGAGTTTATGTAGCTT | 1 | 1 | NC | NC |
| 604 | 1004 | GTCAATGAGTTTATGTAGCT | 2 | 2 | NC | NC |
| 605 | 1005 | AGTCAATGAGTTTATGTAGC | 2 | 2 | NC | NC |
| 606 | 1006 | AAGTCAATGAGTTTATGTAG | 2 | 2 | NC | NC |
| 607 | 1007 | AAAGTCAATGAGTTTATGTA | 2 | 2 | NC | NC |
| 608 | 1008 | AAAAGTCAATGAGTTTATGT | 2 | 2 | NC | NC |
| 609 | 1009 | AAAAAGTCAATGAGTTTATG | 1 | 2 | NC | NC |
| 610 | 1015 | CTTAATAAAAAGTCAATGAG | 2 | 1 | NC | NC |
| 611 | 1016 | CCTTAATAAAAAGTCAATGA | 1 | 2 | NC | NC |
| 612 | 1017 | TCCTTAATAAAAAGTCAATG | 2 | 2 | NC | NC |
| 613 | 1020 | CTTTCCTTAATAAAAAGTCA | 1 | 2 | NC | NC |
| 614 | 1021 | TCTTTCCTTAATAAAAAGTC | 0 | 2 | NC | NC |
| 615 | 1033 | CATATAATACTTTCTTTCCT | 1 | NC | NC | NC |
| 616 | 1034 | GCATATAATACTTTCTTTCC | 1 | NC | NC | NC |
| 617 | 1035 | TGCATATAATACTTTCTTTC | 2 | NC | NC | NC |
| 618 | 1037 | CTTGCATATAATACTTTCTT | 2 | NC | NC | NC |
| 619 | 1038 | GCTTGCATATAATACTTTCT | 2 | NC | NC | NC |
| 620 | 1039 | GGCTTGCATATAATACTTTC | 3 | NC | NC | NC |
| 621 | 1040 | TGGCTTGCATATAATACTTT | 3 | NC | NC | NC |
| 622 | 1041 | TTGGCTTGCATATAATACTT | 2 | NC | NC | NC |
| 623 | 1042 | TTTGGCTTGCATATAATACT | 1 | 1 | NC | NC |
| 624 | 1043 | CTTTGGCTTGCATATAATAC | 2 | 2 | NC | NC |
| 625 | 1044 | TCTTTGGCTTGCATATAATA | 2 | 2 | NC | NC |
| 626 | 1045 | TTCTTTGGCTTGCATATAAT | 1 | 2 | NC | NC |
| 627 | 1046 | ATTCTTTGGCTTGCATATAA | 1 | NC | NC | NC |
| 628 | 1047 | CATTCTTTGGCTTGCATATA | 2 | NC | NC | NC |
| 629 | 1048 | CCATTCTTTGGCTTGCATAT | 1 | NC | NC | NC |
| 630 | 1067 | CATTTGCCTACTGGTGGGAC | 2 | NC | NC | NC |
| 631 | 1068 | TCATTTGCCTACTGGTGGGA | 2 | NC | NC | NC |
| 632 | 1069 | TTCATTTGCCTACTGGTGGG | 2 | NC | NC | NC |
| 633 | 1070 | ATTCATTTGCCTACTGGTGG | 1 | NC | NC | NC |
| 634 | 1071 | AATTCATTTGCCTACTGGTG | 2 | NC | NC | NC |
| 635 | 1072 | GAATTCATTTGCCTACTGGT | 2 | NC | NC | NC |
| 636 | 1073 | TGAATTCATTTGCCTACTGG | 2 | NC | NC | NC |
| 637 | 1074 | TTGAATTCATTTGCCTACTG | 1 | NC | NC | NC |
| 638 | 1075 | CTTGAATTCATTTGCCTACT | 1 | NC | NC | NC |
| 639 | 1076 | ACTTGAATTCATTTGCCTAC | 2 | NC | NC | NC |
| 640 | 1077 | GACTTGAATTCATTTGCCTA | 1 | NC | NC | NC |
| 641 | 1078 | AGACTTGAATTCATTTGCCT | 2 | NC | NC | NC |
| 642 | 1079 | AAGACTTGAATTCATTTGCC | 1 | NC | NC | NC |
| 643 | 1080 | GAAGACTTGAATTCATTTGC | 2 | NC | NC | NC |
| 644 | 1081 | CGAAGACTTGAATTCATTTG | 2 | NC | NC | NC |
| 645 | 1082 | CCGAAGACTTGAATTCATTT | 2 | NC | NC | NC |
| 646 | 1083 | GCCGAAGACTTGAATTCATT | 3 | NC | NC | NC |
| 647 | 1084 | TGCCGAAGACTTGAATTCAT | 2 | NC | NC | NC |
| 648 | 1085 | GTGCCGAAGACTTGAATTCA | 2 | NC | NC | NC |
| 649 | 1086 | GGTGCCGAAGACTTGAATTC | 2 | NC | NC | NC |
| 650 | 1113 | ATATGCCATAGAGTTCTGGG | 2 | 2 | NC | NC |
| 651 | 1114 | TATATGCCATAGAGTTCTGG | 2 | 2 | NC | NC |
| 652 | 1115 | ATATATGCCATAGAGTTCTG | 2 | 2 | NC | NC |
| 653 | 1116 | CATATATGCCATAGAGTTCT | 2 | 2 | NC | NC |
| 654 | 1117 | ACATATATGCCATAGAGTTC | 2 | 2 | NC | NC |
| 655 | 1118 | TACATATATGCCATAGAGTT | 2 | 2 | NC | NC |
| 656 | 1119 | TTACATATATGCCATAGAGT | 1 | 2 | NC | NC |
| 657 | 1120 | ATTACATATATGCCATAGAG | 2 | 2 | NC | NC |
| 658 | 1121 | AATTACATATATGCCATAGA | 1 | 2 | NC | NC |
| 659 | 1122 | TAATTACATATATGCCATAG | 2 | 2 | NC | NC |
| 660 | 1125 | CATTAATTACATATATGCCA | 2 | 2 | NC | NC |
| 661 | 1126 | ACATTAATTACATATATGCC | 2 | 2 | NC | NC |
| 662 | 1127 | CACATTAATTACATATATGC | 2 | 1 | NC | NC |
| 663 | 1128 | GCACATTAATTACATATATG | 1 | 2 | NC | NC |
| 664 | 1130 | CTGCACATTAATTACATATA | 1 | 1 | NC | NC |
| 665 | 1131 | ACTGCACATTAATTACATAT | 1 | 2 | NC | NC |
| 666 | 1132 | CACTGCACATTAATTACATA | 2 | 2 | NC | NC |
| 667 | 1133 | GCACTGCACATTAATTACAT | 2 | 1 | NC | NC |
| 668 | 1134 | GGCACTGCACATTAATTACA | 1 | 1 | NC | NC |
| 669 | 1135 | TGGCACTGCACATTAATTAC | 2 | 2 | NC | NC |
| 670 | 1136 | TTGGCACTGCACATTAATTA | 2 | 2 | NC | NC |
| 671 | 1137 | ATTGGCACTGCACATTAATT | 2 | 2 | NC | NC |
| 672 | 1138 | AATTGGCACTGCACATTAAT | 2 | 2 | NC | NC |
| 673 | 1139 | GAATTGGCACTGCACATTAA | 2 | 2 | NC | NC |
| 674 | 1140 | AGAATTGGCACTGCACATTA | 2 | 2 | NC | NC |
| 675 | 1141 | CAGAATTGGCACTGCACATT | 2 | 2 | NC | NC |
| 676 | 1142 | ACAGAATTGGCACTGCACAT | 2 | 2 | NC | NC |
| 677 | 1143 | CACAGAATTGGCACTGCACA | 2 | 2 | NC | NC |
| 678 | 1144 | TCACAGAATTGGCACTGCAC | 1 | 2 | NC | NC |
| 679 | 1145 | CTCACAGAATTGGCACTGCA | 2 | 2 | NC | NC |
| 680 | 1146 | ACTCACAGAATTGGCACTGC | 2 | 2 | NC | NC |
| 681 | 1148 | ATACTCACAGAATTGGCACT | 2 | 2 | NC | NC |
| 682 | 1149 | CATACTCACAGAATTGGCAC | 2 | 2 | NC | NC |
| 683 | 1150 | TCATACTCACAGAATTGGCA | 2 | 2 | NC | NC |
| 684 | 1151 | ATCATACTCACAGAATTGGC | 2 | 3 | NC | NC |
| 685 | 1152 | CATCATACTCACAGAATTGG | 2 | 2 | NC | NC |
| 686 | 1153 | ACATCATACTCACAGAATTG | 2 | 2 | NC | NC |
| 687 | 1154 | CACATCATACTCACAGAATT | 1 | 2 | NC | NC |
| 688 | 1155 | ACACATCATACTCACAGAAT | 2 | 2 | NC | NC |
| 689 | 1156 | CACACATCATACTCACAGAA | 1 | 2 | NC | NC |
| 690 | 1157 | GCACACATCATACTCACAGA | 2 | 2 | NC | NC |
| 691 | 1158 | TGCACACATCATACTCACAG | 2 | 1 | NC | NC |
| 692 | 1159 | ATGCACACATCATACTCACA | 1 | 2 | NC | NC |
| 693 | 1160 | CATGCACACATCATACTCAC | 2 | 2 | NC | NC |
| 694 | 1161 | CCATGCACACATCATACTCA | 2 | 2 | NC | NC |
| 695 | 1162 | TCCATGCACACATCATACTC | 1 | 2 | NC | NC |
| 696 | 1163 | CTCCATGCACACATCATACT | 1 | 1 | NC | NC |
| 697 | 1176 | GAGTTTTGGCTGGCTCCATG | 2 | 2 | NC | NC |
| 698 | 1177 | AGAGTTTTGGCTGGCTCCAT | 2 | 2 | NC | NC |
| 699 | 1178 | CAGAGTTTTGGCTGGCTCCA | 2 | 2 | NC | NC |
| 700 | 1179 | TCAGAGTTTTGGCTGGCTCC | 2 | 2 | NC | NC |
| 701 | 1180 | ATCAGAGTTTTGGCTGGCTC | 2 | 2 | 2 | 2 |
| 702 | 1181 | AATCAGAGTTTTGGCTGGCT | 2 | 2 | 2 | 2 |
| 703 | 1182 | CAATCAGAGTTTTGGCTGGC | 2 | 2 | 2 | 2 |
| 704 | 1183 | TCAATCAGAGTTTTGGCTGG | 2 | 2 | 2 | 2 |
| 705 | 1184 | TTCAATCAGAGTTTTGGCTG | 2 | NC | NC | NC |
| 706 | 1185 | ATTCAATCAGAGTTTTGGCT | 2 | NC | NC | NC |
| 707 | 1186 | AATTCAATCAGAGTTTTGGC | 2 | NC | NC | NC |
| 708 | 1187 | AAATTCAATCAGAGTTTTGG | 2 | NC | NC | NC |
| 709 | 1188 | GAAATTCAATCAGAGTTTTG | 2 | NC | NC | NC |
| 710 | 1189 | TGAAATTCAATCAGAGTTTT | 1 | NC | NC | NC |
| 711 | 1196 | CCAGTTCTGAAATTCAATCA | 1 | NC | NC | NC |
| 712 | 1197 | CCCAGTTCTGAAATTCAATC | 2 | NC | NC | NC |
| 713 | 1198 | TCCCAGTTCTGAAATTCAAT | 2 | NC | NC | NC |
| 714 | 1199 | GTCCCAGTTCTGAAATTCAA | 2 | NC | NC | NC |
| 715 | 1200 | TGTCCCAGTTCTGAAATTCA | 2 | NC | NC | NC |
| 716 | 1201 | GTGTCCCAGTTCTGAAATTC | 1 | NC | NC | NC |
| 717 | 1202 | AGTGTCCCAGTTCTGAAATT | 1 | NC | NC | NC |
| 718 | 1203 | GAGTGTCCCAGTTCTGAAAT | 2 | NC | NC | NC |
| 719 | 1204 | AGAGTGTCCCAGTTCTGAAA | 2 | 2 | NC | NC |
| 720 | 1205 | GAGAGTGTCCCAGTTCTGAA | 2 | 2 | NC | NC |
| 721 | 1206 | AGAGAGTGTCCCAGTTCTGA | 2 | 2 | NC | NC |
| 722 | 1207 | AAGAGAGTGTCCCAGTTCTG | 2 | 2 | NC | NC |
| 723 | 1208 | CAAGAGAGTGTCCCAGTTCT | 1 | 2 | NC | NC |
| 724 | 1209 | ACAAGAGAGTGTCCCAGTTC | 2 | 2 | NC | NC |
| 725 | 1210 | AACAAGAGAGTGTCCCAGTT | 1 | 2 | NC | NC |
| 726 | 1211 | AAACAAGAGAGTGTCCCAGT | 2 | 2 | NC | NC |
| 727 | 1212 | AAAACAAGAGAGTGTCCCAG | 2 | 1 | NC | NC |
| 728 | 1213 | CAAAACAAGAGAGTGTCCCA | 2 | 1 | NC | NC |
| 729 | 1214 | GCAAAACAAGAGAGTGTCCC | 2 | NC | NC | NC |
| 730 | 1215 | TGCAAAACAAGAGAGTGTCC | 2 | NC | NC | NC |
| 731 | 1216 | ATGCAAAACAAGAGAGTGTC | 1 | NC | NC | NC |
| 732 | 1217 | AATGCAAAACAAGAGAGTGT | 2 | NC | NC | NC |
| 733 | 1218 | GAATGCAAAACAAGAGAGTG | 1 | NC | NC | NC |
| 734 | 1219 | TGAATGCAAAACAAGAGAGT | 1 | NC | NC | NC |
| 735 | 1220 | CTGAATGCAAAACAAGAGAG | 1 | NC | NC | NC |
| 736 | 1221 | CCTGAATGCAAAACAAGAGA | 2 | NC | NC | NC |
| 737 | 1222 | TCCTGAATGCAAAACAAGAG | 2 | NC | NC | NC |
| 738 | 1223 | TTCCTGAATGCAAAACAAGA | 1 | NC | NC | NC |
| 739 | 1224 | CTTCCTGAATGCAAAACAAG | 1 | NC | NC | NC |
| 740 | 1225 | CCTTCCTGAATGCAAAACAA | 2 | NC | NC | NC |
| 741 | 1226 | TCCTTCCTGAATGCAAAACA | 1 | NC | NC | NC |
| 742 | 1227 | CTCCTTCCTGAATGCAAAAC | 2 | NC | NC | NC |
| 743 | 1228 | ACTCCTTCCTGAATGCAAAA | 2 | NC | NC | NC |
| 744 | 1229 | CACTCCTTCCTGAATGCAAA | 2 | NC | NC | NC |
| 745 | 1230 | TCACTCCTTCCTGAATGCAA | 1 | NC | NC | NC |
| 746 | 1231 | TTCACTCCTTCCTGAATGCA | 1 | NC | NC | NC |
| 747 | 1232 | TTTCACTCCTTCCTGAATGC | 1 | NC | NC | NC |
| 748 | 1233 | TTTTCACTCCTTCCTGAATG | 2 | NC | NC | NC |
| 749 | 1234 | ATTTTCACTCCTTCCTGAAT | 2 | 1 | NC | NC |
| 750 | 1235 | CATTTTCACTCCTTCCTGAA | 2 | 2 | NC | NC |
| 751 | 1236 | ACATTTTCACTCCTTCCTGA | 2 | 2 | NC | NC |
| 752 | 1237 | AACATTTTCACTCCTTCCTG | 2 | 2 | NC | NC |
| 753 | 1238 | AAACATTTTCACTCCTTCCT | 2 | 2 | NC | NC |
| 754 | 1239 | AAAACATTTTCACTCCTTCC | 1 | 1 | NC | NC |
| 755 | 1240 | AAAAACATTTTCACTCCTTC | 2 | 1 | NC | NC |
| 756 | 1241 | TAAAAACATTTTCACTCCTT | 1 | 0 | NC | NC |
| 757 | 1242 | TTAAAAACATTTTCACTCCT | 2 | 1 | NC | NC |
| 758 | 1243 | TTTAAAAACATTTTCACTCC | 2 | 2 | NC | NC |
| 759 | 1244 | CTTTAAAAACATTTTCACTC | 1 | 1 | NC | NC |
| 760 | 1245 | GCTTTAAAAACATTTTCACT | 1 | 1 | NC | NC |
| 761 | 1246 | TGCTTTAAAAACATTTTCAC | 0 | 1 | NC | NC |
| 762 | 1248 | CTTGCTTTAAAAACATTTTC | 1 | 1 | NC | NC |
| 763 | 1262 | CACAAATAATTTTTCTTGCT | 0 | 1 | NC | NC |
| 764 | 1263 | CCACAAATAATTTTTCTTGC | 1 | 2 | NC | NC |
| 765 | 1264 | TCCACAAATAATTTTTCTTG | 1 | 2 | NC | NC |
| 766 | 1272 | CTGATAATTCCACAAATAAT | 2 | 2 | NC | NC |
| 767 | 1273 | CCTGATAATTCCACAAATAA | 2 | 2 | NC | NC |
| 768 | 1274 | ACCTGATAATTCCACAAATA | 2 | 2 | NC | NC |
| 769 | 1275 | CACCTGATAATTCCACAAAT | 2 | 2 | NC | NC |
| 770 | 1276 | TCACCTGATAATTCCACAAA | 2 | 2 | NC | NC |
| 771 | 1277 | CTCACCTGATAATTCCACAA | 2 | 1 | NC | NC |
| 772 | 1278 | CCTCACCTGATAATTCCACA | 2 | 2 | NC | NC |
| 773 | 1279 | TCCTCACCTGATAATTCCAC | 2 | 2 | NC | NC |
| 774 | 1280 | ATCCTCACCTGATAATTCCA | 2 | 2 | NC | NC |
| 775 | 1281 | TATCCTCACCTGATAATTCC | 2 | 2 | NC | NC |
| 776 | 1282 | ATATCCTCACCTGATAATTC | 2 | 2 | NC | NC |
| 777 | 1283 | AATATCCTCACCTGATAATT | 2 | 2 | NC | NC |
| 778 | 1284 | TAATATCCTCACCTGATAAT | 2 | 2 | NC | NC |
| 779 | 1285 | TTAATATCCTCACCTGATAA | 2 | 2 | NC | NC |
| 780 | 1286 | CTTAATATCCTCACCTGATA | 2 | 2 | NC | NC |
| 781 | 1287 | CCTTAATATCCTCACCTGAT | 2 | 2 | NC | NC |
| 782 | 1288 | TCCTTAATATCCTCACCTGA | 2 | 2 | NC | NC |
| 783 | 1289 | TTCCTTAATATCCTCACCTG | 2 | 2 | NC | NC |
| 784 | 1290 | ATTCCTTAATATCCTCACCT | 2 | 2 | NC | NC |
| 785 | 1291 | AATTCCTTAATATCCTCACC | 1 | 1 | NC | NC |
| 786 | 1292 | AAATTCCTTAATATCCTCAC | 2 | 2 | NC | NC |
| 787 | 1293 | TAAATTCCTTAATATCCTCA | 2 | 2 | NC | NC |
| 788 | 1294 | CTAAATTCCTTAATATCCTC | 2 | 2 | NC | NC |
| 789 | 1295 | ACTAAATTCCTTAATATCCT | 2 | 2 | NC | NC |
| 790 | 1296 | CACTAAATTCCTTAATATCC | 2 | 2 | NC | NC |
| 791 | 1297 | TCACTAAATTCCTTAATATC | 1 | 1 | NC | NC |
| 792 | 1299 | CTTCACTAAATTCCTTAATA | 1 | 1 | NC | NC |
| 793 | 1300 | TCTTCACTAAATTCCTTAAT | 2 | 1 | NC | NC |
| 794 | 1301 | ATCTTCACTAAATTCCTTAA | 2 | 2 | NC | NC |
| 795 | 1302 | TATCTTCACTAAATTCCTTA | 2 | 2 | NC | NC |
| 796 | 1303 | TTATCTTCACTAAATTCCTT | 1 | 1 | NC | NC |
| 797 | 1304 | ATTATCTTCACTAAATTCCT | 2 | 2 | NC | NC |
| 798 | 1305 | CATTATCTTCACTAAATTCC | 2 | 2 | NC | NC |
| 799 | 1306 | CCATTATCTTCACTAAATTC | 2 | 2 | NC | NC |
| 800 | 1307 | ACCATTATCTTCACTAAATT | 2 | 2 | NC | NC |
| 801 | 1308 | AACCATTATCTTCACTAAAT | 2 | 2 | NC | NC |
| 802 | 1309 | AAACCATTATCTTCACTAAA | 1 | 2 | NC | NC |
| 803 | 1310 | AAAACCATTATCTTCACTAA | 2 | 2 | NC | NC |
| 804 | 1311 | TAAAACCATTATCTTCACTA | 1 | 1 | NC | NC |
| 805 | 1312 | CTAAAACCATTATCTTCACT | 1 | NC | NC | NC |
| 806 | 1313 | ACTAAAACCATTATCTTCAC | 2 | NC | NC | NC |
| 807 | 1314 | AACTAAAACCATTATCTTCA | 2 | NC | NC | NC |
| 808 | 1315 | AAACTAAAACCATTATCTTC | 2 | NC | NC | NC |
| 809 | 1323 | CATCAAATAAACTAAAACCA | 2 | NC | NC | NC |
| 810 | 1324 | GCATCAAATAAACTAAAACC | 2 | NC | NC | NC |
| 811 | 1325 | AGCATCAAATAAACTAAAAC | 2 | NC | NC | NC |
| 812 | 1327 | GTAGCATCAAATAAACTAAA | 2 | NC | NC | NC |
| 813 | 1328 | AGTAGCATCAAATAAACTAA | 2 | NC | NC | NC |
| 814 | 1329 | GAGTAGCATCAAATAAACTA | 2 | NC | NC | NC |
| 815 | 1330 | AGAGTAGCATCAAATAAACT | 2 | NC | NC | NC |
| 816 | 1331 | AAGAGTAGCATCAAATAAAC | 1 | NC | NC | NC |
| 817 | 1332 | GAAGAGTAGCATCAAATAAA | 1 | 2 | NC | NC |
| 818 | 1333 | TGAAGAGTAGCATCAAATAA | 2 | 2 | NC | NC |
| 819 | 1334 | CTGAAGAGTAGCATCAAATA | 2 | 2 | NC | NC |
| 820 | 1335 | TCTGAAGAGTAGCATCAAAT | 2 | 1 | NC | NC |
| 821 | 1336 | TTCTGAAGAGTAGCATCAAA | 2 | 2 | NC | NC |
| 822 | 1337 | CTTCTGAAGAGTAGCATCAA | 2 | 2 | NC | NC |
| 823 | 1342 | ACACGCTTCTGAAGAGTAGC | 2 | 2 | NC | NC |
| 824 | 1343 | CACACGCTTCTGAAGAGTAG | 2 | 2 | NC | NC |
| 825 | 1344 | TCACACGCTTCTGAAGAGTA | 2 | 2 | NC | NC |
| 826 | 1346 | AGTCACACGCTTCTGAAGAG | 3 | 2 | NC | NC |
| 827 | 1347 | AAGTCACACGCTTCTGAAGA | 2 | 2 | NC | NC |
| 828 | 1354 | TCATCGGAAGTCACACGCTT | 2 | 3 | NC | NC |
| 829 | 1355 | CTCATCGGAAGTCACACGCT | 2 | 2 | NC | NC |
| 830 | 1356 | TCTCATCGGAAGTCACACGC | 2 | 2 | NC | NC |
| 831 | 1357 | CTCTCATCGGAAGTCACACG | 2 | 2 | NC | NC |
| 832 | 1358 | CCTCTCATCGGAAGTCACAC | 2 | 2 | NC | NC |
| 833 | 1359 | TCCTCTCATCGGAAGTCACA | 2 | 2 | NC | NC |
| 834 | 1360 | CTCCTCTCATCGGAAGTCAC | 2 | 2 | NC | NC |
| 835 | 1361 | GCTCCTCTCATCGGAAGTCA | 3 | NC | NC | NC |
| 836 | 1362 | TGCTCCTCTCATCGGAAGTC | 2 | NC | NC | NC |
| 837 | 1363 | TTGCTCCTCTCATCGGAAGT | 3 | NC | NC | NC |
| 838 | 1364 | ATTGCTCCTCTCATCGGAAG | 2 | NC | NC | NC |
| 839 | 1365 | AATTGCTCCTCTCATCGGAA | 3 | NC | NC | NC |
| 840 | 1366 | AAATTGCTCCTCTCATCGGA | 3 | NC | NC | NC |
| 841 | 1367 | GAAATTGCTCCTCTCATCGG | 2 | NC | NC | NC |
| 842 | 1368 | GGAAATTGCTCCTCTCATCG | 2 | NC | NC | NC |
| 843 | 1369 | TGGAAATTGCTCCTCTCATC | 2 | NC | NC | NC |
| 844 | 1370 | CTGGAAATTGCTCCTCTCAT | 2 | NC | NC | NC |
| 845 | 1371 | CCTGGAAATTGCTCCTCTCA | 1 | NC | NC | NC |
| 846 | 1372 | TCCTGGAAATTGCTCCTCTC | 1 | NC | NC | NC |
| 847 | 1373 | TTCCTGGAAATTGCTCCTCT | 2 | NC | NC | NC |
| 848 | 1374 | CTTCCTGGAAATTGCTCCTC | 1 | NC | NC | NC |
| 849 | 1375 | GCTTCCTGGAAATTGCTCCT | 2 | NC | NC | NC |
| 850 | 1376 | TGCTTCCTGGAAATTGCTCC | 2 | NC | NC | NC |
| 851 | 1377 | ATGCTTCCTGGAAATTGCTC | 2 | NC | NC | NC |
| 852 | 1378 | CATGCTTCCTGGAAATTGCT | 1 | NC | NC | NC |
| 853 | 1379 | ACATGCTTCCTGGAAATTGC | 1 | NC | NC | NC |
| 854 | 1380 | TACATGCTTCCTGGAAATTG | 1 | NC | NC | NC |
| 855 | 1381 | TTACATGCTTCCTGGAAATT | 2 | NC | NC | NC |
| 856 | 1382 | ATTACATGCTTCCTGGAAAT | 2 | NC | NC | NC |
| 857 | 1383 | TATTACATGCTTCCTGGAAA | 2 | 2 | NC | NC |
| 858 | 1384 | TTATTACATGCTTCCTGGAA | 2 | 2 | NC | NC |
| 859 | 1385 | ATTATTACATGCTTCCTGGA | 2 | 2 | NC | NC |
| 860 | 1386 | TATTATTACATGCTTCCTGG | 1 | 2 | NC | NC |
| 861 | 1387 | ATATTATTACATGCTTCCTG | 2 | 2 | NC | NC |
| 862 | 1388 | AATATTATTACATGCTTCCT | 2 | 2 | NC | NC |
| 863 | 1389 | AAATATTATTACATGCTTCC | 2 | 1 | NC | NC |
| 864 | 1403 | CTCATAGGAATCTAAAATAT | 2 | 2 | NC | NC |
| 865 | 1404 | TCTCATAGGAATCTAAAATA | 2 | 2 | NC | NC |
| 866 | 1405 | ATCTCATAGGAATCTAAAAT | 2 | 2 | NC | NC |
| 867 | 1406 | CATCTCATAGGAATCTAAAA | 2 | 2 | NC | NC |
| 868 | 1407 | ACATCTCATAGGAATCTAAA | 2 | 2 | NC | NC |
| 869 | 1408 | AACATCTCATAGGAATCTAA | 2 | 2 | NC | NC |
| 870 | 1409 | AAACATCTCATAGGAATCTA | 2 | 2 | NC | NC |
| 871 | 1410 | TAAACATCTCATAGGAATCT | 2 | 2 | NC | NC |
| 872 | 1411 | TTAAACATCTCATAGGAATC | 2 | 2 | NC | NC |
| 873 | 1412 | ATTAAACATCTCATAGGAAT | 2 | 2 | NC | NC |
| 874 | 1413 | AATTAAACATCTCATAGGAA | 1 | 1 | NC | NC |
| 875 | 1414 | AAATTAAACATCTCATAGGA | 1 | 2 | NC | NC |
| 876 | 1415 | CAAATTAAACATCTCATAGG | 2 | 2 | NC | NC |
| 877 | 1416 | GCAAATTAAACATCTCATAG | 1 | 2 | NC | NC |
| 878 | 1417 | TGCAAATTAAACATCTCATA | 1 | 1 | NC | NC |
| 879 | 1418 | CTGCAAATTAAACATCTCAT | 2 | NC | NC | NC |
| 880 | 1419 | ACTGCAAATTAAACATCTCA | 2 | NC | NC | NC |
| 881 | 1420 | GACTGCAAATTAAACATCTC | 2 | NC | NC | NC |
| 882 | 1421 | TGACTGCAAATTAAACATCT | 1 | NC | NC | NC |
| 883 | 1422 | TTGACTGCAAATTAAACATC | 2 | NC | NC | NC |
| 884 | 1423 | TTTGACTGCAAATTAAACAT | 2 | NC | NC | NC |
| 885 | 1436 | TCTTTTCACAGCTTTTGACT | 1 | NC | NC | NC |
| 886 | 1437 | TTCTTTTCACAGCTTTTGAC | 1 | NC | NC | NC |
| 887 | 1438 | TTTCTTTTCACAGCTTTTGA | 1 | NC | NC | NC |
| 888 | 1439 | TTTTCTTTTCACAGCTTTTG | 1 | NC | NC | NC |
| 889 | 1440 | TTTTTCTTTTCACAGCTTTT | 1 | NC | NC | NC |
| 890 | 1441 | GTTTTTCTTTTCACAGCTTT | 1 | NC | NC | NC |
| 891 | 1442 | AGTTTTTCTTTTCACAGCTT | 1 | NC | NC | NC |
| 892 | 1443 | TAGTTTTTCTTTTCACAGCT | 1 | NC | NC | NC |
| 893 | 1444 | GTAGTTTTTCTTTTCACAGC | 0 | NC | NC | NC |
| 894 | 1445 | AGTAGTTTTTCTTTTCACAG | 1 | NC | NC | NC |
| 895 | 1446 | CAGTAGTTTTTCTTTTCACA | 2 | NC | NC | NC |
| 896 | 1447 | GCAGTAGTTTTTCTTTTCAC | 1 | NC | NC | NC |
| 897 | 1448 | TGCAGTAGTTTTTCTTTTCA | 1 | NC | NC | NC |
| 898 | 1449 | CTGCAGTAGTTTTTCTTTTC | 2 | NC | NC | NC |
| 899 | 1450 | TCTGCAGTAGTTTTTCTTTT | 1 | NC | NC | NC |
| 900 | 1451 | TTCTGCAGTAGTTTTTCTTT | 1 | NC | NC | NC |
| 901 | 1452 | TTTCTGCAGTAGTTTTTCTT | 1 | NC | NC | NC |
| 902 | 1453 | TTTTCTGCAGTAGTTTTTCT | 1 | NC | NC | NC |
| 903 | 1454 | GTTTTCTGCAGTAGTTTTTC | 2 | NC | NC | NC |
| 904 | 1455 | CGTTTTCTGCAGTAGTTTTT | 2 | NC | NC | NC |
| 905 | 1456 | ACGTTTTCTGCAGTAGTTTT | 2 | NC | NC | NC |
| 906 | 1457 | TACGTTTTCTGCAGTAGTTT | 2 | NC | NC | NC |
| 907 | 1458 | TTACGTTTTCTGCAGTAGTT | 2 | NC | NC | NC |
| 908 | 1459 | TTTACGTTTTCTGCAGTAGT | 2 | NC | NC | NC |
| 909 | 1460 | GTTTACGTTTTCTGCAGTAG | 3 | NC | NC | NC |
| 910 | 1461 | TGTTTACGTTTTCTGCAGTA | 2 | NC | NC | NC |
| 911 | 1462 | GTGTTTACGTTTTCTGCAGT | 3 | NC | NC | NC |
| 912 | 1463 | TGTGTTTACGTTTTCTGCAG | 2 | NC | NC | NC |
| 913 | 1464 | GTGTGTTTACGTTTTCTGCA | 2 | NC | NC | NC |
| 914 | 1465 | TGTGTGTTTACGTTTTCTGC | 2 | NC | NC | NC |
| 915 | 1466 | CTGTGTGTTTACGTTTTCTG | 2 | NC | NC | NC |
| 916 | 1467 | TCTGTGTGTTTACGTTTTCT | 1 | NC | NC | NC |
| 917 | 1468 | CTCTGTGTGTTTACGTTTTC | 1 | NC | NC | NC |
| 918 | 1469 | ACTCTGTGTGTTTACGTTTT | 2 | NC | NC | NC |
| 919 | 1470 | AACTCTGTGTGTTTACGTTT | 2 | NC | NC | NC |
| 920 | 1471 | GAACTCTGTGTGTTTACGTT | 1 | NC | NC | NC |
| 921 | 1472 | AGAACTCTGTGTGTTTACGT | 2 | NC | NC | NC |
| 922 | 1473 | TAGAACTCTGTGTGTTTACG | 3 | NC | NC | NC |
| 923 | 1474 | CTAGAACTCTGTGTGTTTAC | 2 | NC | NC | NC |
| 924 | 1475 | CCTAGAACTCTGTGTGTTTA | 2 | NC | NC | NC |
| 925 | 1476 | CCCTAGAACTCTGTGTGTTT | 2 | NC | NC | NC |
| 926 | 1477 | TCCCTAGAACTCTGTGTGTT | 2 | NC | NC | NC |
| 927 | 1478 | ATCCCTAGAACTCTGTGTGT | 2 | NC | NC | NC |
| 928 | 1479 | AATCCCTAGAACTCTGTGTG | 2 | NC | NC | NC |
| 929 | 1480 | GAATCCCTAGAACTCTGTGT | 2 | NC | NC | NC |
| 930 | 1481 | TGAATCCCTAGAACTCTGTG | 2 | NC | NC | NC |
| 931 | 1482 | CTGAATCCCTAGAACTCTGT | 2 | NC | NC | NC |
| 932 | 1483 | TCTGAATCCCTAGAACTCTG | 2 | NC | NC | NC |
| 933 | 1484 | TTCTGAATCCCTAGAACTCT | 2 | NC | NC | NC |
| 934 | 1485 | CTTCTGAATCCCTAGAACTC | 2 | NC | NC | NC |
| 935 | 1486 | GCTTCTGAATCCCTAGAACT | 2 | NC | NC | NC |
| 936 | 1487 | AGCTTCTGAATCCCTAGAAC | 2 | NC | NC | NC |
| 937 | 1488 | TAGCTTCTGAATCCCTAGAA | 2 | NC | NC | NC |
| 938 | 1489 | GTAGCTTCTGAATCCCTAGA | 2 | NC | NC | NC |
| 939 | 1490 | GGTAGCTTCTGAATCCCTAG | 2 | NC | NC | NC |
| 940 | 1491 | TGGTAGCTTCTGAATCCCTA | 2 | NC | NC | NC |
| 941 | 1492 | CTGGTAGCTTCTGAATCCCT | 2 | NC | NC | NC |
| 942 | 1493 | TCTGGTAGCTTCTGAATCCC | 2 | NC | NC | NC |
| 943 | 1494 | TTCTGGTAGCTTCTGAATCC | 2 | NC | NC | NC |
| 944 | 1495 | TTTCTGGTAGCTTCTGAATC | 2 | NC | NC | NC |
| 945 | 1496 | TTTTCTGGTAGCTTCTGAAT | 2 | NC | NC | NC |
| 946 | 1497 | TTTTTCTGGTAGCTTCTGAA | 2 | NC | NC | NC |
| 947 | 1522 | ATGTACAAAAATGCATCATT | 1 | NC | NC | NC |
| 948 | 1523 | AATGTACAAAAATGCATCAT | 1 | NC | NC | NC |
| 949 | 1524 | AAATGTACAAAAATGCATCA | 1 | NC | NC | NC |
| 950 | 1525 | TAAATGTACAAAAATGCATC | 1 | NC | NC | NC |
| 951 | 1527 | CATAAATGTACAAAAATGCA | 1 | NC | NC | NC |
| 952 | 1528 | TCATAAATGTACAAAAATGC | 1 | NC | NC | NC |
| 953 | 1533 | CTGATTCATAAATGTACAAA | 2 | NC | NC | NC |
| 954 | 1534 | CCTGATTCATAAATGTACAA | 2 | NC | NC | NC |
| 955 | 1535 | ACCTGATTCATAAATGTACA | 2 | NC | NC | NC |
| 956 | 1536 | CACCTGATTCATAAATGTAC | 2 | NC | NC | NC |
| 957 | 1537 | CCACCTGATTCATAAATGTA | 2 | NC | NC | NC |
| 958 | 1538 | ACCACCTGATTCATAAATGT | 2 | NC | NC | NC |
| 959 | 1539 | GACCACCTGATTCATAAATG | 2 | 2 | NC | NC |
| 960 | 1540 | GGACCACCTGATTCATAAAT | 2 | 2 | NC | NC |
| 961 | 1542 | CTGGACCACCTGATTCATAA | 2 | 2 | NC | NC |
| 962 | 1543 | CCTGGACCACCTGATTCATA | 1 | 1 | NC | NC |
| 963 | 1544 | GCCTGGACCACCTGATTCAT | 1 | 1 | NC | NC |
| 964 | 1563 | GCTCTGTCATTTTGCTATGG | 2 | 2 | NC | NC |
| 965 | 1564 | GGCTCTGTCATTTTGCTATG | 2 | 2 | NC | NC |
| 966 | 1565 | TGGCTCTGTCATTTTGCTAT | 1 | 2 | NC | NC |
| 967 | 1566 | ATGGCTCTGTCATTTTGCTA | 2 | 2 | NC | NC |
| 968 | 1567 | GATGGCTCTGTCATTTTGCT | 2 | 2 | NC | NC |
| 969 | 1568 | AGATGGCTCTGTCATTTTGC | 1 | 2 | NC | NC |
| 970 | 1569 | AAGATGGCTCTGTCATTTTG | 2 | 2 | NC | NC |
| 971 | 1570 | AAAGATGGCTCTGTCATTTT | 2 | 2 | NC | NC |
| 972 | 1571 | TAAAGATGGCTCTGTCATTT | 2 | 2 | NC | NC |
| 973 | 1572 | GTAAAGATGGCTCTGTCATT | 2 | 2 | NC | NC |
| 974 | 1573 | TGTAAAGATGGCTCTGTCAT | 2 | 2 | NC | NC |
| 975 | 1574 | TTGTAAAGATGGCTCTGTCA | 2 | 2 | NC | NC |
| 976 | 1575 | TTTGTAAAGATGGCTCTGTC | 2 | 2 | NC | NC |
| 977 | 1576 | TTTTGTAAAGATGGCTCTGT | 2 | 2 | NC | NC |
| 978 | 1577 | GTTTTGTAAAGATGGCTCTG | 1 | 2 | NC | NC |
| 979 | 1578 | TGTTTTGTAAAGATGGCTCT | 1 | 2 | NC | NC |
| 980 | 1579 | TTGTTTTGTAAAGATGGCTC | 2 | 2 | NC | NC |
| 981 | 1580 | TTTGTTTTGTAAAGATGGCT | 2 | 2 | NC | NC |
| 982 | 1581 | CTTTGTTTTGTAAAGATGGC | 1 | 2 | NC | NC |
| 983 | 1582 | TCTTTGTTTTGTAAAGATGG | 1 | 1 | NC | NC |
| 984 | 1586 | GCTGTCTTTGTTTTGTAAAG | 2 | 1 | NC | NC |
| 985 | 1587 | AGCTGTCTTTGTTTTGTAAA | 2 | 1 | NC | NC |
| 986 | 1588 | GAGCTGTCTTTGTTTTGTAA | 2 | 2 | NC | NC |
| 987 | 1589 | AGAGCTGTCTTTGTTTTGTA | 2 | 2 | NC | NC |
| 988 | 1590 | AAGAGCTGTCTTTGTTTTGT | 1 | 1 | NC | NC |
| 989 | 1604 | CTTTGATTCTGAGCAAGAGC | 2 | NC | NC | NC |
| 990 | 1605 | TCTTTGATTCTGAGCAAGAG | 2 | NC | NC | NC |
| 991 | 1606 | ATCTTTGATTCTGAGCAAGA | 2 | NC | NC | NC |
| 992 | 1607 | CATCTTTGATTCTGAGCAAG | 2 | NC | NC | NC |
| 993 | 1608 | ACATCTTTGATTCTGAGCAA | 2 | NC | NC | NC |
| 994 | 1609 | AACATCTTTGATTCTGAGCA | 2 | NC | NC | NC |
| 995 | 1610 | TAACATCTTTGATTCTGAGC | 2 | NC | NC | NC |
| 996 | 1611 | CTAACATCTTTGATTCTGAG | 2 | NC | NC | NC |
| 997 | 1612 | TCTAACATCTTTGATTCTGA | 2 | NC | NC | NC |
| 998 | 1613 | TTCTAACATCTTTGATTCTG | 2 | NC | NC | NC |
| 999 | 1614 | GTTCTAACATCTTTGATTCT | 2 | NC | NC | NC |
| 1000 | 1615 | TGTTCTAACATCTTTGATTC | 2 | NC | NC | NC |
| 1001 | 1625 | AATTGTCTCTTGTTCTAACA | 1 | 1 | NC | NC |
| 1002 | 1626 | CAATTGTCTCTTGTTCTAAC | 2 | 2 | NC | NC |
| 1003 | 1627 | ACAATTGTCTCTTGTTCTAA | 2 | 1 | NC | NC |
| 1004 | 1628 | TACAATTGTCTCTTGTTCTA | 2 | 2 | NC | NC |
| 1005 | 1629 | CTACAATTGTCTCTTGTTCT | 2 | 2 | NC | NC |
| 1006 | 1630 | GCTACAATTGTCTCTTGTTC | 2 | 2 | NC | NC |
| 1007 | 1631 | TGCTACAATTGTCTCTTGTT | 2 | 2 | NC | NC |
| 1008 | 1633 | GATGCTACAATTGTCTCTTG | 2 | 2 | NC | NC |
| 1009 | 1634 | TGATGCTACAATTGTCTCTT | 2 | 2 | NC | NC |
| 1010 | 1635 | CTGATGCTACAATTGTCTCT | 2 | 2 | NC | NC |
| 1011 | 1636 | TCTGATGCTACAATTGTCTC | 2 | 1 | NC | NC |
| 1012 | 1637 | TTCTGATGCTACAATTGTCT | 2 | 1 | NC | NC |
| 1013 | 1638 | CTTCTGATGCTACAATTGTC | 2 | 2 | NC | NC |
| 1014 | 1639 | GCTTCTGATGCTACAATTGT | 2 | 2 | NC | NC |
| 1015 | 1641 | CAGCTTCTGATGCTACAATT | 2 | NC | NC | NC |
| 1016 | 1642 | CCAGCTTCTGATGCTACAAT | 2 | NC | NC | NC |
| 1017 | 1643 | TCCAGCTTCTGATGCTACAA | 2 | NC | NC | NC |
| 1018 | 1644 | CTCCAGCTTCTGATGCTACA | 2 | NC | NC | NC |
| 1019 | 1645 | TCTCCAGCTTCTGATGCTAC | 2 | NC | NC | NC |
| 1020 | 1646 | TTCTCCAGCTTCTGATGCTA | 2 | NC | NC | NC |
| 1021 | 1648 | TTTTCTCCAGCTTCTGATGC | 2 | NC | NC | NC |
| 1022 | 1649 | ATTTTCTCCAGCTTCTGATG | 2 | NC | NC | NC |
| 1023 | 1650 | CATTTTCTCCAGCTTCTGAT | 2 | NC | NC | NC |
| 1024 | 1651 | TCATTTTCTCCAGCTTCTGA | 1 | NC | NC | NC |
| 1025 | 1652 | CTCATTTTCTCCAGCTTCTG | 1 | NC | NC | NC |
| 1026 | 1653 | TCTCATTTTCTCCAGCTTCT | 2 | NC | NC | NC |
| 1027 | 1654 | TTCTCATTTTCTCCAGCTTC | 1 | NC | NC | NC |
| 1028 | 1655 | TTTCTCATTTTCTCCAGCTT | 1 | NC | NC | NC |
| 1029 | 1656 | GTTTCTCATTTTCTCCAGCT | 2 | NC | NC | NC |
| 1030 | 1657 | TGTTTCTCATTTTCTCCAGC | 2 | NC | NC | NC |
| 1031 | 1658 | ATGTTTCTCATTTTCTCCAG | 1 | NC | NC | NC |
| 1032 | 1659 | TATGTTTCTCATTTTCTCCA | 1 | NC | NC | NC |
| 1033 | 1660 | TTATGTTTCTCATTTTCTCC | 1 | 1 | NC | NC |
| 1034 | 1661 | TTTATGTTTCTCATTTTCTC | 1 | 1 | NC | NC |
| 1035 | 1679 | ATGTTCCAGGAAAGATTTTT | 1 | NC | NC | NC |
| 1036 | 1680 | TATGTTCCAGGAAAGATTTT | 2 | NC | NC | NC |
| 1037 | 1681 | CTATGTTCCAGGAAAGATTT | 2 | NC | NC | NC |
| 1038 | 1682 | GCTATGTTCCAGGAAAGATT | 1 | NC | NC | NC |
| 1039 | 1683 | AGCTATGTTCCAGGAAAGAT | 2 | NC | NC | NC |
| 1040 | 1684 | GAGCTATGTTCCAGGAAAGA | 1 | NC | NC | NC |
| 1041 | 1685 | AGAGCTATGTTCCAGGAAAG | 2 | NC | NC | NC |
| 1042 | 1686 | AAGAGCTATGTTCCAGGAAA | 2 | NC | NC | NC |
| 1043 | 1687 | AAAGAGCTATGTTCCAGGAA | 2 | NC | NC | NC |
| 1044 | 1688 | TAAAGAGCTATGTTCCAGGA | 2 | NC | NC | NC |
| 1045 | 1689 | CTAAAGAGCTATGTTCCAGG | 2 | 2 | NC | NC |
| 1046 | 1690 | TCTAAAGAGCTATGTTCCAG | 1 | 2 | NC | NC |
| 1047 | 1691 | TTCTAAAGAGCTATGTTCCA | 2 | 2 | NC | NC |
| 1048 | 1692 | TTTCTAAAGAGCTATGTTCC | 2 | 2 | NC | NC |
| 1049 | 1693 | TTTTCTAAAGAGCTATGTTC | 1 | 1 | NC | NC |
| 1050 | 1694 | ATTTTCTAAAGAGCTATGTT | 1 | NC | NC | NC |
| 1051 | 1695 | GATTTTCTAAAGAGCTATGT | 2 | NC | NC | NC |
| 1052 | 1696 | GGATTTTCTAAAGAGCTATG | 2 | NC | NC | NC |
| 1053 | 1697 | CGGATTTTCTAAAGAGCTAT | 2 | NC | NC | NC |
| 1054 | 1698 | ACGGATTTTCTAAAGAGCTA | 2 | NC | NC | NC |
| 1055 | 1699 | CACGGATTTTCTAAAGAGCT | 2 | NC | NC | NC |
| 1056 | 1700 | ACACGGATTTTCTAAAGAGC | 2 | NC | NC | NC |
| 1057 | 1701 | CACACGGATTTTCTAAAGAG | 2 | NC | NC | NC |
| 1058 | 1702 | CCACACGGATTTTCTAAAGA | 2 | NC | NC | NC |
| 1059 | 1703 | TCCACACGGATTTTCTAAAG | 2 | NC | NC | NC |
| 1060 | 1714 | TCTAAACTGGTTCCACACGG | 2 | NC | NC | NC |
| 1061 | 1715 | TTCTAAACTGGTTCCACACG | 1 | NC | NC | NC |
| 1062 | 1716 | TTTCTAAACTGGTTCCACAC | 1 | NC | NC | NC |
| 1063 | 1717 | ATTTCTAAACTGGTTCCACA | 2 | NC | NC | NC |
| 1064 | 1718 | CATTTCTAAACTGGTTCCAC | 2 | NC | NC | NC |
| 1065 | 1719 | ACATTTCTAAACTGGTTCCA | 2 | NC | NC | NC |
| 1066 | 1720 | AACATTTCTAAACTGGTTCC | 1 | NC | NC | NC |
| 1067 | 1721 | AAACATTTCTAAACTGGTTC | 2 | NC | NC | NC |
| 1068 | 1722 | AAAACATTTCTAAACTGGTT | 1 | NC | NC | NC |
| 1069 | 1723 | AAAAACATTTCTAAACTGGT | 1 | NC | NC | NC |
| 1070 | 1724 | TAAAAACATTTCTAAACTGG | 1 | NC | NC | NC |
| 1071 | 1727 | GCTTAAAAACATTTCTAAAC | 2 | NC | NC | NC |
| 1072 | 1728 | GGCTTAAAAACATTTCTAAA | 2 | NC | NC | NC |
| 1073 | 1729 | GGGCTTAAAAACATTTCTAA | 2 | NC | NC | NC |
| 1074 | 1730 | AGGGCTTAAAAACATTTCTA | 1 | NC | NC | NC |
| 1075 | 1731 | AAGGGCTTAAAAACATTTCT | 1 | 2 | NC | NC |
| 1076 | 1732 | AAAGGGCTTAAAAACATTTC | 1 | 1 | NC | NC |
| 1077 | 1733 | AAAAGGGCTTAAAAACATTT | 1 | 1 | NC | NC |
| 1078 | 1734 | GAAAAGGGCTTAAAAACATT | 1 | 2 | NC | NC |
| 1079 | 1735 | TGAAAAGGGCTTAAAAACAT | 1 | 1 | NC | NC |
| 1080 | 1736 | CTGAAAAGGGCTTAAAAACA | 2 | 1 | NC | NC |
| 1081 | 1737 | TCTGAAAAGGGCTTAAAAAC | 1 | 1 | NC | NC |
| 1082 | 1738 | GTCTGAAAAGGGCTTAAAAA | 2 | 2 | NC | NC |
| 1083 | 1739 | TGTCTGAAAAGGGCTTAAAA | 1 | 1 | NC | NC |
| 1084 | 1740 | GTGTCTGAAAAGGGCTTAAA | 2 | 2 | NC | NC |
| 1085 | 1741 | GGTGTCTGAAAAGGGCTTAA | 2 | 2 | NC | NC |
| 1086 | 1742 | TGGTGTCTGAAAAGGGCTTA | 2 | 2 | NC | NC |
| 1087 | 1743 | ATGGTGTCTGAAAAGGGCTT | 1 | 1 | NC | NC |
| 1088 | 1744 | CATGGTGTCTGAAAAGGGCT | 2 | 2 | NC | NC |
| 1089 | 1745 | ACATGGTGTCTGAAAAGGGC | 2 | 2 | NC | NC |
| 1090 | 1756 | TCCTCAAAGTGACATGGTGT | 1 | NC | NC | NC |
| 1091 | 1757 | CTCCTCAAAGTGACATGGTG | 2 | NC | NC | NC |
| 1092 | 1758 | TCTCCTCAAAGTGACATGGT | 2 | NC | NC | NC |
| 1093 | 1759 | CTCTCCTCAAAGTGACATGG | 3 | NC | NC | NC |
| 1094 | 1760 | ACTCTCCTCAAAGTGACATG | 2 | NC | NC | NC |
| 1095 | 1766 | CTGCCCACTCTCCTCAAAGT | 1 | NC | NC | NC |
| 1096 | 1768 | TCCTGCCCACTCTCCTCAAA | 2 | NC | NC | NC |
| 1097 | 1769 | ATCCTGCCCACTCTCCTCAA | 2 | NC | NC | NC |
| 1098 | 1772 | TAGATCCTGCCCACTCTCCT | 2 | NC | NC | NC |
| 1099 | 1774 | TCTAGATCCTGCCCACTCTC | 2 | NC | NC | NC |
| 1100 | 1775 | TTCTAGATCCTGCCCACTCT | 2 | NC | NC | NC |
| 1101 | 1776 | TTTCTAGATCCTGCCCACTC | 2 | NC | NC | NC |
| 1102 | 1777 | ATTTCTAGATCCTGCCCACT | 2 | NC | NC | NC |
| 1103 | 1778 | TATTTCTAGATCCTGCCCAC | 2 | NC | NC | NC |
| 1104 | 1779 | ATATTTCTAGATCCTGCCCA | 2 | NC | NC | NC |
| 1105 | 1780 | CATATTTCTAGATCCTGCCC | 2 | NC | NC | NC |
| 1106 | 1781 | CCATATTTCTAGATCCTGCC | 2 | NC | NC | NC |
| 1107 | 1782 | TCCATATTTCTAGATCCTGC | 2 | NC | NC | NC |
| 1108 | 1783 | TTCCATATTTCTAGATCCTG | 2 | NC | NC | NC |
| 1109 | 1784 | TTTCCATATTTCTAGATCCT | 1 | 1 | NC | NC |
| 1110 | 1785 | CTTTCCATATTTCTAGATCC | 2 | 2 | NC | NC |
| 1111 | 1786 | TCTTTCCATATTTCTAGATC | 2 | 2 | NC | NC |
| 1112 | 1787 | TTCTTTCCATATTTCTAGAT | 1 | 2 | NC | NC |
| 1113 | 1788 | TTTCTTTCCATATTTCTAGA | 1 | 1 | NC | NC |
| 1114 | 1789 | CTTTCTTTCCATATTTCTAG | 1 | 1 | NC | NC |
| 1115 | 1790 | ACTTTCTTTCCATATTTCTA | 2 | 2 | NC | NC |
| 1116 | 1791 | TACTTTCTTTCCATATTTCT | 1 | 2 | NC | NC |
| 1117 | 1792 | GTACTTTCTTTCCATATTTC | 2 | 2 | NC | NC |
| 1118 | 1793 | AGTACTTTCTTTCCATATTT | 2 | 1 | NC | NC |
| 1119 | 1794 | TAGTACTTTCTTTCCATATT | 1 | 2 | NC | NC |
| 1120 | 1795 | GTAGTACTTTCTTTCCATAT | 1 | 2 | NC | NC |
| 1121 | 1796 | AGTAGTACTTTCTTTCCATA | 2 | 2 | NC | NC |
| 1122 | 1797 | CAGTAGTACTTTCTTTCCAT | 1 | 2 | NC | NC |
| 1123 | 1798 | ACAGTAGTACTTTCTTTCCA | 1 | 2 | NC | NC |
| 1124 | 1799 | AACAGTAGTACTTTCTTTCC | 1 | 2 | NC | NC |
| 1125 | 1800 | TAACAGTAGTACTTTCTTTC | 2 | 2 | NC | NC |
| 1126 | 1801 | TTAACAGTAGTACTTTCTTT | 2 | 2 | NC | NC |
| 1127 | 1802 | ATTAACAGTAGTACTTTCTT | 2 | 2 | NC | NC |
| 1128 | 1803 | CATTAACAGTAGTACTTTCT | 2 | 2 | NC | NC |
| 1129 | 1804 | CCATTAACAGTAGTACTTTC | 2 | NC | NC | NC |
| 1130 | 1805 | GCCATTAACAGTAGTACTTT | 2 | NC | NC | NC |
| 1131 | 1806 | TGCCATTAACAGTAGTACTT | 2 | NC | NC | NC |
| 1132 | 1807 | ATGCCATTAACAGTAGTACT | 2 | NC | NC | NC |
| 1133 | 1808 | CATGCCATTAACAGTAGTAC | 1 | NC | NC | NC |
| 1134 | 1809 | CCATGCCATTAACAGTAGTA | 2 | NC | NC | NC |
| 1135 | 1810 | GCCATGCCATTAACAGTAGT | 2 | NC | NC | NC |
| 1136 | 1811 | AGCCATGCCATTAACAGTAG | 2 | NC | NC | NC |
| 1137 | 1812 | CAGCCATGCCATTAACAGTA | 2 | NC | NC | NC |
| 1138 | 1824 | TCAAGATGTTGGCAGCCATG | 1 | NC | NC | NC |
| 1139 | 1825 | TTCAAGATGTTGGCAGCCAT | 2 | NC | NC | NC |
| 1140 | 1826 | TTTCAAGATGTTGGCAGCCA | 2 | NC | NC | NC |
| 1141 | 1827 | TTTTCAAGATGTTGGCAGCC | 2 | NC | NC | NC |
| 1142 | 1828 | TTTTTCAAGATGTTGGCAGC | 1 | NC | NC | NC |
| 1143 | 1829 | ATTTTTCAAGATGTTGGCAG | 1 | NC | NC | NC |
| 1144 | 1830 | TATTTTTCAAGATGTTGGCA | 2 | NC | NC | NC |
| 1145 | 1831 | TTATTTTTCAAGATGTTGGC | 2 | NC | NC | NC |
| 1146 | 1832 | ATTATTTTTCAAGATGTTGG | 2 | NC | NC | NC |
| 1147 | 1848 | GTTGATTCTGAATTCTATTA | 2 | 2 | NC | NC |
| 1148 | 1849 | GGTTGATTCTGAATTCTATT | 2 | 2 | NC | NC |
| 1149 | 1850 | TGGTTGATTCTGAATTCTAT | 2 | 2 | NC | NC |
| 1150 | 1851 | TTGGTTGATTCTGAATTCTA | 2 | NC | NC | NC |
| 1151 | 1852 | TTTGGTTGATTCTGAATTCT | 2 | NC | NC | NC |
| 1152 | 1853 | CTTTGGTTGATTCTGAATTC | 2 | NC | NC | NC |
| 1153 | 1854 | TCTTTGGTTGATTCTGAATT | 2 | NC | NC | NC |
| 1154 | 1855 | CTCTTTGGTTGATTCTGAAT | 2 | NC | NC | NC |
| 1155 | 1856 | TCTCTTTGGTTGATTCTGAA | 2 | NC | NC | NC |
| 1156 | 1857 | ATCTCTTTGGTTGATTCTGA | 2 | NC | NC | NC |
| 1157 | 1858 | AATCTCTTTGGTTGATTCTG | 2 | NC | NC | NC |
| 1158 | 1859 | AAATCTCTTTGGTTGATTCT | 2 | NC | NC | NC |
| 1159 | 1860 | TAAATCTCTTTGGTTGATTC | 2 | NC | NC | NC |
| 1160 | 1861 | TTAAATCTCTTTGGTTGATT | 2 | NC | NC | NC |
| 1161 | 1862 | TTTAAATCTCTTTGGTTGAT | 2 | NC | NC | NC |
| 1162 | 1863 | CTTTAAATCTCTTTGGTTGA | 2 | NC | NC | NC |
| 1163 | 1864 | TCTTTAAATCTCTTTGGTTG | 2 | NC | NC | NC |
| 1164 | 1865 | ATCTTTAAATCTCTTTGGTT | 2 | NC | NC | NC |
| 1165 | 1866 | CATCTTTAAATCTCTTTGGT | 2 | NC | NC | NC |
| 1166 | 1867 | GCATCTTTAAATCTCTTTGG | 2 | NC | NC | NC |
| 1167 | 1868 | AGCATCTTTAAATCTCTTTG | 2 | NC | NC | NC |
| 1168 | 1869 | TAGCATCTTTAAATCTCTTT | 1 | NC | NC | NC |
| 1169 | 1870 | GTAGCATCTTTAAATCTCTT | 2 | NC | NC | NC |
| 1170 | 1871 | AGTAGCATCTTTAAATCTCT | 1 | 1 | NC | NC |
| 1171 | 1872 | CAGTAGCATCTTTAAATCTC | 1 | 1 | NC | NC |
| 1172 | 1873 | TCAGTAGCATCTTTAAATCT | 2 | 1 | NC | NC |
| 1173 | 1874 | TTCAGTAGCATCTTTAAATC | 1 | 1 | NC | NC |
| 1174 | 1875 | CTTCAGTAGCATCTTTAAAT | 1 | 1 | NC | NC |
| 1175 | 1876 | ACTTCAGTAGCATCTTTAAA | 2 | 2 | NC | NC |
| 1176 | 1877 | CACTTCAGTAGCATCTTTAA | 2 | 1 | NC | NC |
| 1177 | 1878 | CCACTTCAGTAGCATCTTTA | 2 | 2 | NC | NC |
| 1178 | 1879 | CCCACTTCAGTAGCATCTTT | 2 | 2 | NC | NC |
| 1179 | 1880 | TCCCACTTCAGTAGCATCTT | 2 | 2 | NC | NC |
| 1180 | 1881 | ATCCCACTTCAGTAGCATCT | 2 | 2 | NC | NC |
| 1181 | 1882 | CATCCCACTTCAGTAGCATC | 2 | 2 | NC | NC |
| 1182 | 1883 | GCATCCCACTTCAGTAGCAT | 2 | 2 | NC | NC |
| 1183 | 1884 | GGCATCCCACTTCAGTAGCA | 2 | 2 | NC | NC |
| 1184 | 1885 | TGGCATCCCACTTCAGTAGC | 2 | 2 | NC | NC |
| 1185 | 1886 | CTGGCATCCCACTTCAGTAG | 2 | 2 | NC | NC |
| 1186 | 1887 | GCTGGCATCCCACTTCAGTA | 2 | 2 | NC | NC |
| 1187 | 1912 | CATAATGTTGTTGCAAAAGG | 2 | NC | NC | NC |
| 1188 | 1913 | CCATAATGTTGTTGCAAAAG | 2 | NC | NC | NC |
| 1189 | 1914 | CCCATAATGTTGTTGCAAAA | 2 | NC | NC | NC |
| 1190 | 1915 | CCCCATAATGTTGTTGCAAA | 2 | NC | NC | NC |
| 1191 | 1916 | TCCCCATAATGTTGTTGCAA | 1 | NC | NC | NC |
| 1192 | 1917 | CTCCCCATAATGTTGTTGCA | 2 | NC | NC | NC |
| 1193 | 1918 | ACTCCCCATAATGTTGTTGC | 1 | NC | NC | NC |
| 1194 | 1919 | TACTCCCCATAATGTTGTTG | 2 | NC | NC | NC |
| 1195 | 1920 | GTACTCCCCATAATGTTGTT | 2 | NC | NC | NC |
| 1196 | 1921 | TGTACTCCCCATAATGTTGT | 2 | NC | NC | NC |
| 1197 | 1922 | ATGTACTCCCCATAATGTTG | 2 | NC | NC | NC |
| 1198 | 1923 | TATGTACTCCCCATAATGTT | 2 | NC | NC | NC |
| 1199 | 1924 | CTATGTACTCCCCATAATGT | 2 | NC | NC | NC |
| 1200 | 1925 | ACTATGTACTCCCCATAATG | 2 | NC | NC | NC |
| 1201 | 1926 | CACTATGTACTCCCCATAAT | 2 | NC | NC | NC |
| 1202 | 1927 | GCACTATGTACTCCCCATAA | 2 | NC | NC | NC |
| 1203 | 1928 | AGCACTATGTACTCCCCATA | 2 | NC | NC | NC |
| 1204 | 1929 | GAGCACTATGTACTCCCCAT | 3 | NC | NC | NC |
| 1205 | 1930 | TGAGCACTATGTACTCCCCA | 1 | NC | NC | NC |
| 1206 | 1931 | CTGAGCACTATGTACTCCCC | 3 | NC | NC | NC |
| 1207 | 1932 | TCTGAGCACTATGTACTCCC | 2 | NC | NC | NC |
| 1208 | 1933 | GTCTGAGCACTATGTACTCC | 3 | NC | NC | NC |
| 1209 | 1934 | TGTCTGAGCACTATGTACTC | 3 | NC | NC | NC |
| 1210 | 1935 | CTGTCTGAGCACTATGTACT | 2 | NC | NC | NC |
| 1211 | 1936 | TCTGTCTGAGCACTATGTAC | 2 | NC | NC | NC |
| 1212 | 1937 | CTCTGTCTGAGCACTATGTA | 2 | NC | NC | NC |
| 1213 | 1947 | TTTTCTCTTTCTCTGTCTGA | 1 | NC | NC | NC |
| 1214 | 1948 | TTTTTCTCTTTCTCTGTCTG | 1 | NC | NC | NC |
| 1215 | 1967 | ACAATTGCTAGATTCTTTTT | 2 | NC | NC | NC |
| 1216 | 1968 | CACAATTGCTAGATTCTTTT | 2 | NC | NC | NC |
| 1217 | 1969 | CCACAATTGCTAGATTCTTT | 2 | NC | NC | NC |
| 1218 | 1970 | TCCACAATTGCTAGATTCTT | 2 | NC | NC | NC |
| 1219 | 1971 | TTCCACAATTGCTAGATTCT | 2 | NC | NC | NC |
| 1220 | 1972 | CTTCCACAATTGCTAGATTC | 2 | NC | NC | NC |
| 1221 | 1973 | TCTTCCACAATTGCTAGATT | 2 | NC | NC | NC |
| 1222 | 1974 | TTCTTCCACAATTGCTAGAT | 2 | NC | NC | NC |
| 1223 | 1975 | CTTCTTCCACAATTGCTAGA | 2 | NC | NC | NC |
| 1224 | 1976 | TCTTCTTCCACAATTGCTAG | 2 | NC | NC | NC |
| 1225 | 1977 | TTCTTCTTCCACAATTGCTA | 2 | NC | NC | NC |
| 1226 | 1978 | TTTCTTCTTCCACAATTGCT | 1 | NC | NC | NC |
| 1227 | 1979 | ATTTCTTCTTCCACAATTGC | 2 | NC | NC | NC |
| 1228 | 1980 | CATTTCTTCTTCCACAATTG | 2 | NC | NC | NC |
| 1229 | 1981 | ACATTTCTTCTTCCACAATT | 2 | NC | NC | NC |
| 1230 | 1982 | AACATTTCTTCTTCCACAAT | 1 | NC | NC | NC |
| 1231 | 1983 | AAACATTTCTTCTTCCACAA | 1 | NC | NC | NC |
| 1232 | 1984 | AAAACATTTCTTCTTCCACA | 1 | NC | NC | NC |
| 1233 | 1985 | AAAAACATTTCTTCTTCCAC | 1 | NC | NC | NC |
| 1234 | 1986 | TAAAAACATTTCTTCTTCCA | 1 | NC | NC | NC |
| 1235 | 1987 | CTAAAAACATTTCTTCTTCC | 2 | NC | NC | NC |
| 1236 | 1988 | ACTAAAAACATTTCTTCTTC | 1 | NC | NC | NC |
| 1237 | 1993 | CCATAACTAAAAACATTTCT | 2 | NC | NC | NC |
| 1238 | 1994 | CCCATAACTAAAAACATTTC | 2 | NC | NC | NC |
| 1239 | 1995 | GCCCATAACTAAAAACATTT | 2 | NC | NC | NC |
| 1240 | 1996 | CGCCCATAACTAAAAACATT | 3 | NC | NC | NC |
| 1241 | 1997 | TCGCCCATAACTAAAAACAT | 2 | NC | NC | NC |
| 1242 | 1998 | CTCGCCCATAACTAAAAACA | 2 | NC | NC | NC |
| 1243 | 1999 | ACTCGCCCATAACTAAAAAC | 3 | NC | NC | NC |
| 1244 | 2000 | AACTCGCCCATAACTAAAAA | 2 | NC | NC | NC |
| 1245 | 2001 | TAACTCGCCCATAACTAAAA | 2 | NC | NC | NC |
| 1246 | 2002 | TTAACTCGCCCATAACTAAA | 3 | NC | NC | NC |
| 1247 | 2003 | TTTAACTCGCCCATAACTAA | 3 | NC | NC | NC |
| 1248 | 2004 | ATTTAACTCGCCCATAACTA | 3 | NC | NC | NC |
| 1249 | 2005 | AATTTAACTCGCCCATAACT | 3 | NC | NC | NC |
| 1250 | 2006 | TAATTTAACTCGCCCATAAC | 2 | NC | NC | NC |
| 1251 | 2007 | ATAATTTAACTCGCCCATAA | 2 | NC | NC | NC |
| 1252 | 2008 | CATAATTTAACTCGCCCATA | 3 | NC | NC | NC |
| 1253 | 2009 | ACATAATTTAACTCGCCCAT | 3 | NC | NC | NC |
| 1254 | 2010 | AACATAATTTAACTCGCCCA | 3 | NC | NC | NC |
| 1255 | 2011 | GAACATAATTTAACTCGCCC | 3 | NC | NC | NC |
| 1256 | 2012 | GGAACATAATTTAACTCGCC | 2 | NC | NC | NC |
| 1257 | 2013 | TGGAACATAATTTAACTCGC | 2 | NC | NC | NC |
| 1258 | 2027 | AGTTATAAAGCCAGTGGAAC | 2 | 2 | NC | NC |
| 1259 | 2028 | GAGTTATAAAGCCAGTGGAA | 2 | 2 | NC | NC |
| 1260 | 2029 | TGAGTTATAAAGCCAGTGGA | 2 | 1 | 2 | NC |
| 1261 | 2030 | ATGAGTTATAAAGCCAGTGG | 2 | 2 | 2 | NC |
| 1262 | 2031 | CATGAGTTATAAAGCCAGTG | 2 | NC | NC | NC |
| 1263 | 2032 | ACATGAGTTATAAAGCCAGT | 2 | NC | NC | NC |
| 1264 | 2033 | TACATGAGTTATAAAGCCAG | 2 | NC | NC | NC |
| 1265 | 2034 | CTACATGAGTTATAAAGCCA | 2 | NC | NC | NC |
| 1266 | 2035 | ACTACATGAGTTATAAAGCC | 2 | NC | NC | NC |
| 1267 | 2045 | TTCATTTTGTACTACATGAG | 2 | NC | NC | NC |
| 1268 | 2046 | TTTCATTTTGTACTACATGA | 1 | NC | NC | NC |
| 1269 | 2047 | TTTTCATTTTGTACTACATG | 1 | NC | NC | NC |
| 1270 | 2065 | GTTTCAGTTGATTTAGTTTT | 2 | 2 | NC | NC |
| 1271 | 2066 | TGTTTCAGTTGATTTAGTTT | 2 | 1 | NC | NC |
| 1272 | 2067 | CTGTTTCAGTTGATTTAGTT | 2 | 2 | NC | NC |
| 1273 | 2068 | TCTGTTTCAGTTGATTTAGT | 2 | 2 | NC | NC |
| 1274 | 2069 | TTCTGTTTCAGTTGATTTAG | 2 | 1 | 2 | NC |
| 1275 | 2070 | GTTCTGTTTCAGTTGATTTA | 2 | 2 | 2 | NC |
| 1276 | 2071 | TGTTCTGTTTCAGTTGATTT | 1 | 1 | 1 | NC |
| 1277 | 2072 | ATGTTCTGTTTCAGTTGATT | 1 | 1 | 2 | NC |
| 1278 | 2073 | AATGTTCTGTTTCAGTTGAT | 1 | NC | NC | NC |
| 1279 | 2074 | GAATGTTCTGTTTCAGTTGA | 2 | NC | NC | NC |
| 1280 | 2075 | TGAATGTTCTGTTTCAGTTG | 2 | NC | NC | NC |
| 1281 | 2076 | ATGAATGTTCTGTTTCAGTT | 2 | NC | NC | NC |
| 1282 | 2077 | AATGAATGTTCTGTTTCAGT | 2 | NC | NC | NC |
| 1283 | 2078 | AAATGAATGTTCTGTTTCAG | 2 | NC | NC | NC |
| 1284 | 2079 | TAAATGAATGTTCTGTTTCA | 1 | NC | NC | NC |
| 1285 | 2080 | TTAAATGAATGTTCTGTTTC | 1 | NC | NC | NC |
| 1286 | 2097 | CAGGTCTAACATAATTTTTA | 1 | 1 | NC | NC |
| 1287 | 2098 | CCAGGTCTAACATAATTTTT | 2 | 1 | NC | NC |
| 1288 | 2099 | ACCAGGTCTAACATAATTTT | 2 | 1 | NC | NC |
| 1289 | 2100 | GACCAGGTCTAACATAATTT | 3 | 2 | NC | NC |
| 1290 | 2101 | GGACCAGGTCTAACATAATT | 3 | 2 | NC | NC |
| 1291 | 2102 | GGGACCAGGTCTAACATAAT | 3 | 2 | NC | NC |
| 1292 | 2103 | TGGGACCAGGTCTAACATAA | 3 | 2 | NC | NC |
| 1293 | 2104 | GTGGGACCAGGTCTAACATA | 3 | 3 | NC | NC |
| 1294 | 2105 | TGTGGGACCAGGTCTAACAT | 2 | 2 | NC | NC |
| 1295 | 2106 | GTGTGGGACCAGGTCTAACA | 2 | 3 | NC | NC |
| 1296 | 2108 | ACGTGTGGGACCAGGTCTAA | 2 | 2 | NC | NC |
| 1297 | 2118 | TTTCTTGGGCACGTGTGGGA | 2 | 1 | NC | NC |
| 1298 | 2120 | TGTTTCTTGGGCACGTGTGG | 2 | 3 | NC | NC |
| 1299 | 2121 | ATGTTTCTTGGGCACGTGTG | 2 | 2 | NC | NC |
| 1300 | 2122 | AATGTTTCTTGGGCACGTGT | 2 | 2 | NC | NC |
| 1301 | 2123 | AAATGTTTCTTGGGCACGTG | 2 | 2 | NC | NC |
| 1302 | 2124 | CAAATGTTTCTTGGGCACGT | 2 | 2 | NC | NC |
| 1303 | 2131 | CTATTTCCAAATGTTTCTTG | 1 | 2 | NC | NC |
| 1304 | 2132 | TCTATTTCCAAATGTTTCTT | 1 | 2 | NC | NC |
| 1305 | 2133 | TTCTATTTCCAAATGTTTCT | 1 | 1 | NC | NC |
| 1306 | 2134 | GTTCTATTTCCAAATGTTTC | 2 | 2 | NC | NC |
| 1307 | 2135 | TGTTCTATTTCCAAATGTTT | 1 | 1 | NC | NC |
| 1308 | 2136 | GTGTTCTATTTCCAAATGTT | 2 | 1 | NC | NC |
| 1309 | 2137 | CGTGTTCTATTTCCAAATGT | 2 | 2 | NC | NC |
| 1310 | 2138 | ACGTGTTCTATTTCCAAATG | 2 | 2 | NC | NC |
| 1311 | 2139 | GACGTGTTCTATTTCCAAAT | 2 | 2 | NC | NC |
| 1312 | 2140 | TGACGTGTTCTATTTCCAAA | 2 | 2 | NC | NC |
| 1313 | 2141 | ATGACGTGTTCTATTTCCAA | 2 | 2 | NC | NC |
| 1314 | 2142 | AATGACGTGTTCTATTTCCA | 2 | 2 | NC | NC |
| 1315 | 2143 | GAATGACGTGTTCTATTTCC | 2 | 2 | NC | NC |
| 1316 | 2144 | TGAATGACGTGTTCTATTTC | 2 | 2 | NC | NC |
| 1317 | 2145 | CTGAATGACGTGTTCTATTT | 2 | 2 | NC | NC |
| 1318 | 2146 | ACTGAATGACGTGTTCTATT | 2 | 2 | NC | NC |
| 1319 | 2147 | AACTGAATGACGTGTTCTAT | 2 | 2 | NC | NC |
| 1320 | 2148 | CAACTGAATGACGTGTTCTA | 2 | 2 | NC | NC |
| 1321 | 2149 | TCAACTGAATGACGTGTTCT | 2 | 3 | NC | NC |
| 1322 | 2150 | TTCAACTGAATGACGTGTTC | 3 | 3 | NC | NC |
| 1323 | 2151 | TTTCAACTGAATGACGTGTT | 2 | 2 | NC | NC |
| 1324 | 2152 | GTTTCAACTGAATGACGTGT | 3 | 2 | NC | NC |
| 1325 | 2153 | AGTTTCAACTGAATGACGTG | 2 | 3 | NC | NC |
| 1326 | 2164 | TTGATGTCTGGAGTTTCAAC | 2 | NC | NC | NC |
| 1327 | 2165 | TTTGATGTCTGGAGTTTCAA | 2 | NC | NC | NC |
| 1328 | 2166 | CTTTGATGTCTGGAGTTTCA | 1 | NC | NC | NC |
| 1329 | 2167 | TCTTTGATGTCTGGAGTTTC | 2 | NC | NC | NC |
| 1330 | 2168 | ATCTTTGATGTCTGGAGTTT | 2 | NC | NC | NC |
| 1331 | 2169 | AATCTTTGATGTCTGGAGTT | 2 | NC | NC | NC |
| 1332 | 2170 | AAATCTTTGATGTCTGGAGT | 2 | NC | NC | NC |
| 1333 | 2171 | TAAATCTTTGATGTCTGGAG | 2 | NC | NC | NC |
| 1334 | 2172 | CTAAATCTTTGATGTCTGGA | 2 | NC | NC | NC |
| 1335 | 2173 | GCTAAATCTTTGATGTCTGG | 2 | NC | NC | NC |
| 1336 | 2174 | GGCTAAATCTTTGATGTCTG | 2 | NC | NC | NC |
| 1337 | 2175 | TGGCTAAATCTTTGATGTCT | 2 | NC | NC | NC |
| 1338 | 2176 | CTGGCTAAATCTTTGATGTC | 2 | NC | NC | NC |
| 1339 | 2177 | GCTGGCTAAATCTTTGATGT | 2 | NC | NC | NC |
| 1340 | 2178 | TGCTGGCTAAATCTTTGATG | 2 | NC | NC | NC |
| 1341 | 2179 | GTGCTGGCTAAATCTTTGAT | 2 | NC | NC | NC |
| 1342 | 2180 | AGTGCTGGCTAAATCTTTGA | 2 | NC | NC | NC |
| 1343 | 2181 | AAGTGCTGGCTAAATCTTTG | 2 | NC | NC | NC |
| 1344 | 2182 | AAAGTGCTGGCTAAATCTTT | 2 | NC | NC | NC |
| 1345 | 2183 | TAAAGTGCTGGCTAAATCTT | 2 | NC | NC | NC |
| 1346 | 2184 | TTAAAGTGCTGGCTAAATCT | 2 | NC | NC | NC |
| 1347 | 2185 | CTTAAAGTGCTGGCTAAATC | 2 | NC | NC | NC |
| 1348 | 2186 | ACTTAAAGTGCTGGCTAAAT | 2 | NC | NC | NC |
| 1349 | 2187 | TACTTAAAGTGCTGGCTAAA | 2 | NC | NC | NC |
| 1350 | 2188 | TTACTTAAAGTGCTGGCTAA | 2 | NC | NC | NC |
| 1351 | 2189 | TTTACTTAAAGTGCTGGCTA | 2 | NC | NC | NC |
| 1352 | 2190 | CTTTACTTAAAGTGCTGGCT | 2 | NC | NC | NC |
| 1353 | 2199 | GACCAGATTCTTTACTTAAA | 2 | NC | NC | NC |
| 1354 | 2200 | TGACCAGATTCTTTACTTAA | 1 | NC | NC | NC |
| 1355 | 2201 | TTGACCAGATTCTTTACTTA | 1 | NC | NC | NC |
| 1356 | 2202 | ATTGACCAGATTCTTTACTT | 1 | NC | NC | NC |
| 1357 | 2203 | AATTGACCAGATTCTTTACT | 2 | NC | NC | NC |
| 1358 | 2204 | CAATTGACCAGATTCTTTAC | 2 | NC | NC | NC |
| 1359 | 2205 | GCAATTGACCAGATTCTTTA | 2 | NC | NC | NC |
| 1360 | 2206 | GGCAATTGACCAGATTCTTT | 1 | NC | NC | NC |
| 1361 | 2233 | ATATTCGTTCTGCAATTTTT | 2 | NC | NC | NC |
| 1362 | 2234 | TATATTCGTTCTGCAATTTT | 2 | NC | NC | NC |
| 1363 | 2235 | TTATATTCGTTCTGCAATTT | 2 | NC | NC | NC |
| 1364 | 2236 | CTTATATTCGTTCTGCAATT | 2 | NC | NC | NC |
| 1365 | 2237 | ACTTATATTCGTTCTGCAAT | 2 | NC | NC | NC |
| 1366 | 2238 | AACTTATATTCGTTCTGCAA | 2 | NC | NC | NC |
| 1367 | 2239 | TAACTTATATTCGTTCTGCA | 2 | NC | NC | NC |
| 1368 | 2240 | ATAACTTATATTCGTTCTGC | 2 | NC | NC | NC |
| 1369 | 2241 | CATAACTTATATTCGTTCTG | 2 | NC | NC | NC |
| 1370 | 2242 | CCATAACTTATATTCGTTCT | 2 | NC | NC | NC |
| 1371 | 2243 | CCCATAACTTATATTCGTTC | 2 | NC | NC | NC |
| 1372 | 2244 | GCCCATAACTTATATTCGTT | 3 | NC | NC | NC |
| 1373 | 2245 | AGCCCATAACTTATATTCGT | 2 | NC | NC | NC |
| 1374 | 2246 | TAGCCCATAACTTATATTCG | 3 | NC | NC | NC |
| 1375 | 2247 | CTAGCCCATAACTTATATTC | 2 | NC | NC | NC |
| 1376 | 2248 | TCTAGCCCATAACTTATATT | 2 | NC | NC | NC |
| 1377 | 2249 | CTCTAGCCCATAACTTATAT | 2 | NC | NC | NC |
| 1378 | 2250 | TCTCTAGCCCATAACTTATA | 2 | NC | NC | NC |
| 1379 | 2251 | TTCTCTAGCCCATAACTTAT | 2 | NC | NC | NC |
| 1380 | 2252 | ATTCTCTAGCCCATAACTTA | 2 | NC | NC | NC |
| 1381 | 2253 | CATTCTCTAGCCCATAACTT | 1 | NC | NC | NC |
| 1382 | 2254 | TCATTCTCTAGCCCATAACT | 2 | NC | NC | NC |
| 1383 | 2255 | TTCATTCTCTAGCCCATAAC | 2 | NC | NC | NC |
| 1384 | 2256 | GTTCATTCTCTAGCCCATAA | 2 | NC | NC | NC |
| 1385 | 2257 | GGTTCATTCTCTAGCCCATA | 2 | NC | NC | NC |
| 1386 | 2258 | AGGTTCATTCTCTAGCCCAT | 2 | NC | NC | NC |
| 1387 | 2259 | TAGGTTCATTCTCTAGCCCA | 2 | 2 | NC | NC |
| 1388 | 2260 | GTAGGTTCATTCTCTAGCCC | 2 | 2 | NC | NC |
| 1389 | 2261 | TGTAGGTTCATTCTCTAGCC | 2 | 2 | NC | NC |
| 1390 | 2262 | CTGTAGGTTCATTCTCTAGC | 2 | 2 | NC | NC |
| 1391 | 2263 | GCTGTAGGTTCATTCTCTAG | 2 | 2 | NC | NC |
| 1392 | 2264 | TGCTGTAGGTTCATTCTCTA | 2 | 2 | NC | NC |
| 1393 | 2265 | TTGCTGTAGGTTCATTCTCT | 2 | 2 | NC | NC |
| 1394 | 2266 | GTTGCTGTAGGTTCATTCTC | 2 | 2 | NC | NC |
| 1395 | 2267 | AGTTGCTGTAGGTTCATTCT | 2 | 2 | NC | NC |
| 1396 | 2268 | AAGTTGCTGTAGGTTCATTC | 2 | 2 | NC | NC |
| 1397 | 2269 | TAAGTTGCTGTAGGTTCATT | 2 | 2 | NC | NC |
| 1398 | 2270 | ATAAGTTGCTGTAGGTTCAT | 2 | 2 | NC | NC |
| 1399 | 2271 | TATAAGTTGCTGTAGGTTCA | 2 | NC | NC | NC |
| 1400 | 2272 | GTATAAGTTGCTGTAGGTTC | 1 | NC | NC | NC |
| 1401 | 2273 | TGTATAAGTTGCTGTAGGTT | 2 | NC | NC | NC |
| 1402 | 2274 | TTGTATAAGTTGCTGTAGGT | 2 | NC | NC | NC |
| 1403 | 2275 | ATTGTATAAGTTGCTGTAGG | 2 | NC | NC | NC |
| 1404 | 2276 | CATTGTATAAGTTGCTGTAG | 2 | NC | NC | NC |
| 1405 | 2277 | ACATTGTATAAGTTGCTGTA | 1 | NC | NC | NC |
| 1406 | 2278 | AACATTGTATAAGTTGCTGT | 2 | NC | NC | NC |
| 1407 | 2279 | AAACATTGTATAAGTTGCTG | 2 | NC | NC | NC |
| 1408 | 2280 | AAAACATTGTATAAGTTGCT | 2 | NC | NC | NC |
| 1409 | 2281 | GAAAACATTGTATAAGTTGC | 2 | NC | NC | NC |
| 1410 | 2282 | AGAAAACATTGTATAAGTTG | 1 | NC | NC | NC |
| 1411 | 2283 | CAGAAAACATTGTATAAGTT | 2 | NC | NC | NC |
| 1412 | 2284 | GCAGAAAACATTGTATAAGT | 2 | NC | NC | NC |
| 1413 | 2285 | AGCAGAAAACATTGTATAAG | 2 | NC | NC | NC |
| 1414 | 2286 | AAGCAGAAAACATTGTATAA | 1 | NC | NC | NC |
| 1415 | 2287 | AAAGCAGAAAACATTGTATA | 1 | NC | NC | NC |
| 1416 | 2288 | AAAAGCAGAAAACATTGTAT | 2 | NC | NC | NC |
| 1417 | 2289 | GAAAAGCAGAAAACATTGTA | 1 | NC | NC | NC |
| 1418 | 2290 | TGAAAAGCAGAAAACATTGT | 2 | NC | NC | NC |
| 1419 | 2301 | TGCTACCTTCCTGAAAAGCA | 2 | NC | NC | NC |
| 1420 | 2302 | TTGCTACCTTCCTGAAAAGC | 2 | NC | NC | NC |
| 1421 | 2303 | TTTGCTACCTTCCTGAAAAG | 2 | NC | NC | NC |
| 1422 | 2304 | TTTTGCTACCTTCCTGAAAA | 1 | NC | NC | NC |
| 1423 | 2305 | TTTTTGCTACCTTCCTGAAA | 1 | NC | NC | NC |
| 1424 | 2321 | GCAATCTGTTTGTGATTTTT | 2 | NC | NC | NC |
| 1425 | 2322 | TGCAATCTGTTTGTGATTTT | 2 | NC | NC | NC |
| 1426 | 2323 | ATGCAATCTGTTTGTGATTT | 2 | NC | NC | NC |
| 1427 | 2324 | TATGCAATCTGTTTGTGATT | 2 | NC | NC | NC |
| 1428 | 2325 | ATATGCAATCTGTTTGTGAT | 2 | NC | NC | NC |
| 1429 | 2326 | AATATGCAATCTGTTTGTGA | 2 | NC | NC | NC |
| 1430 | 2327 | TAATATGCAATCTGTTTGTG | 2 | NC | NC | NC |
| 1431 | 2328 | ATAATATGCAATCTGTTTGT | 2 | NC | NC | NC |
| 1432 | 2330 | AGATAATATGCAATCTGTTT | 1 | NC | NC | NC |
| 1433 | 2334 | TATCAGATAATATGCAATCT | 2 | NC | NC | NC |
| 1434 | 2335 | GTATCAGATAATATGCAATC | 2 | NC | NC | NC |
| 1435 | 2336 | TGTATCAGATAATATGCAAT | 1 | NC | NC | NC |
| 1436 | 2337 | ATGTATCAGATAATATGCAA | 1 | 1 | NC | NC |
| 1437 | 2338 | GATGTATCAGATAATATGCA | 2 | 2 | NC | NC |
| 1438 | 2339 | GGATGTATCAGATAATATGC | 2 | 2 | NC | NC |
| 1439 | 2340 | GGGATGTATCAGATAATATG | 2 | 2 | NC | NC |
| 1440 | 2368 | GAAACGTGTCTATACCAGGG | 2 | 2 | NC | NC |
| 1441 | 2369 | GGAAACGTGTCTATACCAGG | 3 | NC | NC | NC |
| 1442 | 2370 | TGGAAACGTGTCTATACCAG | 2 | NC | NC | NC |
| 1443 | 2371 | TTGGAAACGTGTCTATACCA | 2 | NC | NC | NC |
| 1444 | 2372 | ATTGGAAACGTGTCTATACC | 3 | NC | NC | NC |
| 1445 | 2373 | CATTGGAAACGTGTCTATAC | 2 | NC | NC | NC |
| 1446 | 2374 | TCATTGGAAACGTGTCTATA | 3 | NC | NC | NC |
| 1447 | 2375 | ATCATTGGAAACGTGTCTAT | 2 | NC | NC | NC |
| 1448 | 2376 | TATCATTGGAAACGTGTCTA | 2 | NC | NC | NC |
| 1449 | 2377 | CTATCATTGGAAACGTGTCT | 2 | NC | NC | NC |
| 1450 | 2378 | ACTATCATTGGAAACGTGTC | 2 | NC | NC | NC |
| 1451 | 2379 | TACTATCATTGGAAACGTGT | 3 | NC | NC | NC |
| 1452 | 2380 | CTACTATCATTGGAAACGTG | 3 | NC | NC | NC |
| 1453 | 2381 | CCTACTATCATTGGAAACGT | 3 | NC | NC | NC |
| 1454 | 2382 | TCCTACTATCATTGGAAACG | 3 | NC | NC | NC |
| 1455 | 2383 | TTCCTACTATCATTGGAAAC | 2 | NC | NC | NC |
| 1456 | 2385 | TTTTCCTACTATCATTGGAA | 1 | NC | NC | NC |
| 1457 | 2386 | GTTTTCCTACTATCATTGGA | 2 | NC | NC | NC |
| 1458 | 2387 | TGTTTTCCTACTATCATTGG | 2 | NC | NC | NC |
| 1459 | 2388 | CTGTTTTCCTACTATCATTG | 1 | NC | NC | NC |
| 1460 | 2389 | TCTGTTTTCCTACTATCATT | 1 | 2 | NC | NC |
| 1461 | 2390 | ATCTGTTTTCCTACTATCAT | 2 | 2 | NC | NC |
| 1462 | 2391 | TATCTGTTTTCCTACTATCA | 2 | 2 | NC | NC |
| 1463 | 2392 | TTATCTGTTTTCCTACTATC | 2 | 2 | NC | NC |
| 1464 | 2393 | TTTATCTGTTTTCCTACTAT | 1 | 2 | NC | NC |
| 1465 | 2394 | ATTTATCTGTTTTCCTACTA | 1 | 1 | NC | NC |
| 1466 | 2395 | AATTTATCTGTTTTCCTACT | 1 | 1 | NC | NC |
| 1467 | 2396 | TAATTTATCTGTTTTCCTAC | 1 | 2 | NC | NC |
| 1468 | 2405 | GAAACCAATTAATTTATCTG | 2 | NC | NC | NC |
| 1469 | 2407 | GAGAAACCAATTAATTTATC | 1 | NC | NC | NC |
| 1470 | 2421 | GGACGATTGGTTTGGAGAAA | 1 | NC | NC | NC |
| 1471 | 2422 | CGGACGATTGGTTTGGAGAA | 2 | NC | NC | NC |
| 1472 | 2423 | ACGGACGATTGGTTTGGAGA | 3 | NC | NC | NC |
| 1473 | 2424 | TACGGACGATTGGTTTGGAG | 2 | 3 | NC | NC |
| 1474 | 2425 | TTACGGACGATTGGTTTGGA | 3 | 3 | NC | NC |
| 1475 | 2426 | CTTACGGACGATTGGTTTGG | 3 | 3 | NC | NC |
| 1476 | 2427 | TCTTACGGACGATTGGTTTG | 3 | 3 | NC | NC |
| 1477 | 2428 | TTCTTACGGACGATTGGTTT | 2 | 3 | NC | NC |
| 1478 | 2429 | CTTCTTACGGACGATTGGTT | 2 | 3 | NC | NC |
| 1479 | 2430 | GCTTCTTACGGACGATTGGT | 2 | 3 | NC | NC |
| 1480 | 2431 | AGCTTCTTACGGACGATTGG | 3 | 3 | NC | NC |
| 1481 | 2432 | TAGCTTCTTACGGACGATTG | 3 | 3 | NC | NC |
| 1482 | 2433 | TTAGCTTCTTACGGACGATT | 2 | 2 | NC | NC |
| 1483 | 2434 | CTTAGCTTCTTACGGACGAT | 2 | 2 | NC | NC |
| 1484 | 2435 | GCTTAGCTTCTTACGGACGA | 3 | 3 | NC | NC |
| 1485 | 2436 | AGCTTAGCTTCTTACGGACG | 2 | 3 | NC | NC |
| 1486 | 2448 | GCTGTGAACTCAAGCTTAGC | 3 | 3 | NC | NC |
| 1487 | 2449 | AGCTGTGAACTCAAGCTTAG | 2 | 2 | NC | NC |
| 1488 | 2450 | TAGCTGTGAACTCAAGCTTA | 1 | 1 | NC | NC |
| 1489 | 2451 | CTAGCTGTGAACTCAAGCTT | 1 | 2 | NC | NC |
| 1490 | 2453 | TCCTAGCTGTGAACTCAAGC | 2 | 2 | NC | NC |
| 1491 | 2454 | ATCCTAGCTGTGAACTCAAG | 2 | 2 | NC | NC |
| 1492 | 2455 | GATCCTAGCTGTGAACTCAA | 2 | 2 | NC | NC |
| 1493 | 2456 | AGATCCTAGCTGTGAACTCA | 2 | 2 | NC | NC |
| 1494 | 2457 | AAGATCCTAGCTGTGAACTC | 2 | 2 | NC | NC |
| 1495 | 2458 | AAAGATCCTAGCTGTGAACT | 2 | 2 | NC | NC |
| 1496 | 2459 | TAAAGATCCTAGCTGTGAAC | 2 | 2 | NC | NC |
| 1497 | 2460 | CTAAAGATCCTAGCTGTGAA | 2 | 2 | NC | NC |
| 1498 | 2461 | TCTAAAGATCCTAGCTGTGA | 2 | 2 | NC | NC |
| 1499 | 2462 | CTCTAAAGATCCTAGCTGTG | 2 | 2 | NC | NC |
| 1500 | 2463 | TCTCTAAAGATCCTAGCTGT | 2 | 2 | NC | NC |
| 1501 | 2464 | TTCTCTAAAGATCCTAGCTG | 2 | 2 | NC | NC |
| 1502 | 2465 | CTTCTCTAAAGATCCTAGCT | 2 | 2 | NC | NC |
| 1503 | 2466 | ACTTCTCTAAAGATCCTAGC | 2 | 2 | NC | NC |
| 1504 | 2467 | AACTTCTCTAAAGATCCTAG | 2 | 2 | NC | NC |
| 1505 | 2468 | AAACTTCTCTAAAGATCCTA | 2 | 2 | NC | NC |
| 1506 | 2469 | TAAACTTCTCTAAAGATCCT | 2 | 2 | NC | NC |
| 1507 | 2470 | TTAAACTTCTCTAAAGATCC | 2 | 2 | NC | NC |
| 1508 | 2471 | CTTAAACTTCTCTAAAGATC | 2 | 2 | NC | NC |
| 1509 | 2472 | TCTTAAACTTCTCTAAAGAT | 1 | 1 | NC | NC |
| 1510 | 2473 | CTCTTAAACTTCTCTAAAGA | 2 | 1 | 1 | 2 |
| 1511 | 2474 | CCTCTTAAACTTCTCTAAAG | 1 | 1 | 2 | 2 |
| 1512 | 2475 | GCCTCTTAAACTTCTCTAAA | 2 | 1 | 2 | 2 |
| 1513 | 2476 | TGCCTCTTAAACTTCTCTAA | 2 | 1 | 1 | 2 |
| 1514 | 2477 | TTGCCTCTTAAACTTCTCTA | 2 | 1 | NC | NC |
| 1515 | 2478 | ATTGCCTCTTAAACTTCTCT | 1 | 1 | NC | NC |
| 1516 | 2479 | TATTGCCTCTTAAACTTCTC | 2 | 2 | NC | NC |
| 1517 | 2480 | ATATTGCCTCTTAAACTTCT | 2 | 2 | NC | NC |
| 1518 | 2481 | CATATTGCCTCTTAAACTTC | 2 | 2 | NC | NC |
| 1519 | 2482 | CCATATTGCCTCTTAAACTT | 2 | 2 | NC | NC |
| 1520 | 2483 | CCCATATTGCCTCTTAAACT | 2 | 2 | NC | NC |
| 1521 | 2484 | TCCCATATTGCCTCTTAAAC | 2 | 2 | NC | NC |
| 1522 | 2485 | TTCCCATATTGCCTCTTAAA | 2 | 2 | NC | NC |
| 1523 | 2486 | CTTCCCATATTGCCTCTTAA | 2 | 2 | NC | NC |
| 1524 | 2487 | CCTTCCCATATTGCCTCTTA | 2 | 2 | NC | NC |
| 1525 | 2488 | ACCTTCCCATATTGCCTCTT | 2 | 2 | NC | NC |
| 1526 | 2489 | AACCTTCCCATATTGCCTCT | 2 | 2 | NC | NC |
| 1527 | 2490 | CAACCTTCCCATATTGCCTC | 2 | 2 | NC | NC |
| 1528 | 2491 | TCAACCTTCCCATATTGCCT | 2 | 2 | NC | NC |
| 1529 | 2492 | TTCAACCTTCCCATATTGCC | 2 | 2 | NC | NC |
| 1530 | 2493 | TTTCAACCTTCCCATATTGC | 2 | 2 | NC | NC |
| 1531 | 2494 | TTTTCAACCTTCCCATATTG | 2 | 2 | NC | NC |
| 1532 | 2495 | ATTTTCAACCTTCCCATATT | 1 | 1 | NC | NC |
| 1533 | 2496 | GATTTTCAACCTTCCCATAT | 2 | 2 | NC | NC |
| 1534 | 2497 | GGATTTTCAACCTTCCCATA | 1 | 2 | NC | NC |
| 1535 | 2498 | AGGATTTTCAACCTTCCCAT | 2 | 2 | NC | NC |
| 1536 | 2499 | GAGGATTTTCAACCTTCCCA | 1 | 2 | NC | NC |
| 1537 | 2500 | AGAGGATTTTCAACCTTCCC | 1 | 1 | NC | NC |
| 1538 | 2501 | CAGAGGATTTTCAACCTTCC | 2 | 2 | NC | NC |
| 1539 | 2502 | CCAGAGGATTTTCAACCTTC | 1 | 2 | NC | NC |
| 1540 | 2503 | TCCAGAGGATTTTCAACCTT | 1 | 1 | NC | NC |
| 1541 | 2504 | ATCCAGAGGATTTTCAACCT | 1 | 1 | NC | NC |
| 1542 | 2505 | TATCCAGAGGATTTTCAACC | 2 | 2 | NC | NC |
| 1543 | 2506 | GTATCCAGAGGATTTTCAAC | 2 | 2 | NC | NC |
| 1544 | 2507 | TGTATCCAGAGGATTTTCAA | 1 | 1 | NC | NC |
| 1545 | 2508 | CTGTATCCAGAGGATTTTCA | 2 | 2 | NC | NC |
| 1546 | 2519 | TTCCTCTACTTCTGTATCCA | 2 | 2 | NC | NC |
| 1547 | 2520 | TTTCCTCTACTTCTGTATCC | 2 | 2 | NC | NC |
| 1548 | 2521 | CTTTCCTCTACTTCTGTATC | 2 | 2 | NC | NC |
| 1549 | 2522 | ACTTTCCTCTACTTCTGTAT | 2 | 1 | NC | NC |
| 1550 | 2523 | TACTTTCCTCTACTTCTGTA | 1 | 1 | NC | NC |
| 1551 | 2524 | TTACTTTCCTCTACTTCTGT | 2 | 2 | NC | NC |
| 1552 | 2525 | ATTACTTTCCTCTACTTCTG | 2 | NC | NC | NC |
| 1553 | 2526 | CATTACTTTCCTCTACTTCT | 1 | NC | NC | NC |
| 1554 | 2527 | CCATTACTTTCCTCTACTTC | 1 | NC | NC | NC |
| 1555 | 2528 | TCCATTACTTTCCTCTACTT | 0 | NC | NC | NC |
| 1556 | 2529 | CTCCATTACTTTCCTCTACT | 0 | NC | NC | NC |
| 1557 | 2530 | ACTCCATTACTTTCCTCTAC | 0 | NC | NC | NC |
| 1558 | 2531 | GACTCCATTACTTTCCTCTA | 1 | NC | NC | NC |
| 1559 | 2532 | TGACTCCATTACTTTCCTCT | 1 | NC | NC | NC |
| 1560 | 2533 | GTGACTCCATTACTTTCCTC | 1 | NC | NC | NC |
| 1561 | 2534 | AGTGACTCCATTACTTTCCT | 2 | NC | NC | NC |
| 1562 | 2535 | TAGTGACTCCATTACTTTCC | 2 | NC | NC | NC |
| 1563 | 2536 | GTAGTGACTCCATTACTTTC | 2 | NC | NC | NC |
| 1564 | 2537 | GGTAGTGACTCCATTACTTT | 2 | NC | NC | NC |
| 1565 | 2538 | TGGTAGTGACTCCATTACTT | 3 | NC | NC | NC |
| 1566 | 2539 | TTGGTAGTGACTCCATTACT | 2 | NC | NC | NC |
| 1567 | 2540 | ATTGGTAGTGACTCCATTAC | 2 | NC | NC | NC |
| 1568 | 2541 | GATTGGTAGTGACTCCATTA | 3 | NC | NC | NC |
| 1569 | 2542 | AGATTGGTAGTGACTCCATT | 1 | NC | NC | NC |
| 1570 | 2543 | GAGATTGGTAGTGACTCCAT | 2 | NC | NC | NC |
| 1571 | 2544 | TGAGATTGGTAGTGACTCCA | 2 | NC | NC | NC |
| 1572 | 2545 | CTGAGATTGGTAGTGACTCC | 2 | 3 | NC | NC |
| 1573 | 2546 | ACTGAGATTGGTAGTGACTC | 2 | 3 | NC | NC |
| 1574 | 2547 | GACTGAGATTGGTAGTGACT | 2 | 2 | NC | NC |
| 1575 | 2548 | AGACTGAGATTGGTAGTGAC | 2 | NC | NC | NC |
| 1576 | 2549 | AAGACTGAGATTGGTAGTGA | 2 | NC | NC | NC |
| 1577 | 2550 | GAAGACTGAGATTGGTAGTG | 2 | NC | NC | NC |
| 1578 | 2551 | TGAAGACTGAGATTGGTAGT | 2 | NC | NC | NC |
| 1579 | 2552 | TTGAAGACTGAGATTGGTAG | 2 | NC | NC | NC |
| 1580 | 2553 | CTTGAAGACTGAGATTGGTA | 1 | NC | NC | NC |
| 1581 | 2554 | ACTTGAAGACTGAGATTGGT | 2 | NC | NC | NC |
| 1582 | 2555 | AACTTGAAGACTGAGATTGG | 2 | NC | NC | NC |
| 1583 | 2556 | CAACTTGAAGACTGAGATTG | 2 | NC | NC | NC |
| 1584 | 2557 | TCAACTTGAAGACTGAGATT | 1 | NC | NC | NC |
| 1585 | 2558 | TTCAACTTGAAGACTGAGAT | 2 | NC | NC | NC |
| 1586 | 2559 | GTTCAACTTGAAGACTGAGA | 2 | NC | NC | NC |
| 1587 | 2560 | GGTTCAACTTGAAGACTGAG | 2 | NC | NC | NC |
| 1588 | 2561 | AGGTTCAACTTGAAGACTGA | 2 | NC | NC | NC |
| 1589 | 2562 | CAGGTTCAACTTGAAGACTG | 2 | NC | NC | NC |
| 1590 | 2563 | TCAGGTTCAACTTGAAGACT | 2 | NC | NC | NC |
| 1591 | 2564 | GTCAGGTTCAACTTGAAGAC | 2 | NC | NC | NC |
| 1592 | 2565 | TGTCAGGTTCAACTTGAAGA | 2 | NC | NC | NC |
| 1593 | 2566 | ATGTCAGGTTCAACTTGAAG | 2 | NC | NC | NC |
| 1594 | 2567 | AATGTCAGGTTCAACTTGAA | 2 | NC | NC | NC |
| 1595 | 2568 | GAATGTCAGGTTCAACTTGA | 2 | 2 | NC | NC |
| 1596 | 2569 | AGAATGTCAGGTTCAACTTG | 2 | 2 | NC | NC |
| 1597 | 2570 | CAGAATGTCAGGTTCAACTT | 2 | 2 | NC | NC |
| 1598 | 2584 | TTCTTGTCCTTCAGCAGAAT | 2 | NC | NC | NC |
| 1599 | 2585 | GTTCTTGTCCTTCAGCAGAA | 1 | NC | NC | NC |
| 1600 | 2586 | GGTTCTTGTCCTTCAGCAGA | 2 | NC | NC | NC |
| 1601 | 2587 | CGGTTCTTGTCCTTCAGCAG | 2 | NC | NC | NC |
| 1602 | 2588 | GCGGTTCTTGTCCTTCAGCA | 2 | NC | NC | NC |
| 1603 | 2589 | AGCGGTTCTTGTCCTTCAGC | 1 | NC | NC | NC |
| 1604 | 2590 | AAGCGGTTCTTGTCCTTCAG | 1 | NC | NC | NC |
| 1605 | 2591 | TAAGCGGTTCTTGTCCTTCA | 2 | NC | NC | NC |
| 1606 | 2592 | CTAAGCGGTTCTTGTCCTTC | 2 | NC | NC | NC |
| 1607 | 2593 | TCTAAGCGGTTCTTGTCCTT | 3 | NC | NC | NC |
| 1608 | 2594 | CTCTAAGCGGTTCTTGTCCT | 3 | NC | NC | NC |
| 1609 | 2595 | TCTCTAAGCGGTTCTTGTCC | 2 | NC | NC | NC |
| 1610 | 2596 | TTCTCTAAGCGGTTCTTGTC | 2 | NC | NC | NC |
| 1611 | 2597 | GTTCTCTAAGCGGTTCTTGT | 2 | NC | NC | NC |
| 1612 | 2598 | AGTTCTCTAAGCGGTTCTTG | 2 | NC | NC | NC |
| 1613 | 2600 | AGAGTTCTCTAAGCGGTTCT | 2 | NC | NC | NC |
| 1614 | 2601 | CAGAGTTCTCTAAGCGGTTC | 3 | NC | NC | NC |
| 1615 | 2602 | TCAGAGTTCTCTAAGCGGTT | 3 | NC | NC | NC |
| 1616 | 2603 | ATCAGAGTTCTCTAAGCGGT | 3 | NC | NC | NC |
| 1617 | 2604 | CATCAGAGTTCTCTAAGCGG | 3 | NC | NC | NC |
| 1618 | 2605 | ACATCAGAGTTCTCTAAGCG | 2 | NC | NC | NC |
| 1619 | 2606 | AACATCAGAGTTCTCTAAGC | 1 | NC | NC | NC |
| 1620 | 2607 | AAACATCAGAGTTCTCTAAG | 1 | NC | NC | NC |
| 1621 | 2608 | CAAACATCAGAGTTCTCTAA | 1 | NC | NC | NC |
| 1622 | 2609 | ACAAACATCAGAGTTCTCTA | 1 | NC | NC | NC |
| 1623 | 2610 | TACAAACATCAGAGTTCTCT | 2 | NC | NC | NC |
| 1624 | 2611 | TTACAAACATCAGAGTTCTC | 2 | NC | NC | NC |
| 1625 | 2612 | TTTACAAACATCAGAGTTCT | 2 | NC | NC | NC |
| 1626 | 2613 | TTTTACAAACATCAGAGTTC | 2 | NC | NC | NC |
| 1627 | 2614 | ATTTTACAAACATCAGAGTT | 2 | 2 | NC | NC |
| 1628 | 2615 | GATTTTACAAACATCAGAGT | 2 | 1 | NC | NC |
| 1629 | 2616 | TGATTTTACAAACATCAGAG | 2 | 2 | NC | NC |
| 1630 | 2617 | GTGATTTTACAAACATCAGA | 1 | 1 | NC | NC |
| 1631 | 2618 | AGTGATTTTACAAACATCAG | 2 | 1 | NC | NC |
| 1632 | 2619 | TAGTGATTTTACAAACATCA | 2 | 1 | NC | NC |
| 1633 | 2620 | GTAGTGATTTTACAAACATC | 2 | 2 | NC | NC |
| 1634 | 2621 | AGTAGTGATTTTACAAACAT | 2 | 2 | NC | NC |
| 1635 | 2622 | TAGTAGTGATTTTACAAACA | 1 | 2 | NC | NC |
| 1636 | 2623 | ATAGTAGTGATTTTACAAAC | 2 | 2 | NC | NC |
| 1637 | 2624 | CATAGTAGTGATTTTACAAA | 2 | 1 | NC | NC |
| 1638 | 2625 | CCATAGTAGTGATTTTACAA | 2 | NC | NC | NC |
| 1639 | 2626 | TCCATAGTAGTGATTTTACA | 2 | NC | NC | NC |
| 1640 | 2627 | CTCCATAGTAGTGATTTTAC | 2 | NC | NC | NC |
| 1641 | 2628 | GCTCCATAGTAGTGATTTTA | 2 | NC | NC | NC |
| 1642 | 2629 | TGCTCCATAGTAGTGATTTT | 2 | NC | NC | NC |
| 1643 | 2630 | ATGCTCCATAGTAGTGATTT | 2 | NC | NC | NC |
| 1644 | 2631 | TATGCTCCATAGTAGTGATT | 3 | NC | NC | NC |
| 1645 | 2632 | CTATGCTCCATAGTAGTGAT | 3 | NC | NC | NC |
| 1646 | 2640 | CTGAATCACTATGCTCCATA | 2 | NC | NC | NC |
| 1647 | 2641 | TCTGAATCACTATGCTCCAT | 2 | NC | NC | NC |
| 1648 | 2642 | ATCTGAATCACTATGCTCCA | 2 | NC | NC | NC |
| 1649 | 2643 | TATCTGAATCACTATGCTCC | 2 | NC | NC | NC |
| 1650 | 2644 | CTATCTGAATCACTATGCTC | 2 | NC | NC | NC |
| 1651 | 2645 | ACTATCTGAATCACTATGCT | 2 | NC | NC | NC |
| 1652 | 2646 | TACTATCTGAATCACTATGC | 2 | NC | NC | NC |
| 1653 | 2647 | CTACTATCTGAATCACTATG | 2 | NC | NC | NC |
| 1654 | 2648 | ACTACTATCTGAATCACTAT | 2 | NC | NC | NC |
| 1655 | 2649 | AACTACTATCTGAATCACTA | 2 | NC | NC | NC |
| 1656 | 2650 | CAACTACTATCTGAATCACT | 1 | NC | NC | NC |
| 1657 | 2651 | ACAACTACTATCTGAATCAC | 1 | NC | NC | NC |
| 1658 | 2652 | GACAACTACTATCTGAATCA | 2 | NC | NC | NC |
| 1659 | 2653 | TGACAACTACTATCTGAATC | 2 | NC | NC | NC |
| 1660 | 2654 | TTGACAACTACTATCTGAAT | 1 | NC | NC | NC |
| 1661 | 2655 | GTTGACAACTACTATCTGAA | 2 | NC | NC | NC |
| 1662 | 2656 | GGTTGACAACTACTATCTGA | 2 | NC | NC | NC |
| 1663 | 2657 | TGGTTGACAACTACTATCTG | 2 | NC | NC | NC |
| 1664 | 2658 | CTGGTTGACAACTACTATCT | 1 | NC | NC | NC |
| 1665 | 2659 | GCTGGTTGACAACTACTATC | 2 | NC | NC | NC |
| 1666 | 2660 | TGCTGGTTGACAACTACTAT | 2 | NC | NC | NC |
| 1667 | 2661 | TTGCTGGTTGACAACTACTA | 2 | NC | NC | NC |
| 1668 | 2662 | CTTGCTGGTTGACAACTACT | 2 | NC | NC | NC |
| 1669 | 2663 | GCTTGCTGGTTGACAACTAC | 2 | NC | NC | NC |
| 1670 | 2664 | GGCTTGCTGGTTGACAACTA | 2 | NC | NC | NC |
| 1671 | 2665 | TGGCTTGCTGGTTGACAACT | 2 | NC | NC | NC |
| 1672 | 2666 | GTGGCTTGCTGGTTGACAAC | 2 | NC | NC | NC |
| 1673 | 2667 | TGTGGCTTGCTGGTTGACAA | 2 | NC | NC | NC |
| 1674 | 2668 | ATGTGGCTTGCTGGTTGACA | 2 | NC | NC | NC |
| 1675 | 2669 | GATGTGGCTTGCTGGTTGAC | 2 | NC | NC | NC |
| 1676 | 2670 | GGATGTGGCTTGCTGGTTGA | 2 | NC | NC | NC |
| 1677 | 2671 | AGGATGTGGCTTGCTGGTTG | 2 | NC | NC | NC |
| 1678 | 2672 | AAGGATGTGGCTTGCTGGTT | 2 | NC | NC | NC |
| 1679 | 2673 | TAAGGATGTGGCTTGCTGGT | 2 | NC | NC | NC |
| 1680 | 2674 | TTAAGGATGTGGCTTGCTGG | 2 | NC | NC | NC |
| 1681 | 2675 | GTTAAGGATGTGGCTTGCTG | 2 | NC | NC | NC |
| 1682 | 2676 | AGTTAAGGATGTGGCTTGCT | 2 | NC | NC | NC |
| 1683 | 2677 | GAGTTAAGGATGTGGCTTGC | 2 | NC | NC | NC |
| 1684 | 2678 | TGAGTTAAGGATGTGGCTTG | 2 | NC | NC | NC |
| 1685 | 2679 | CTGAGTTAAGGATGTGGCTT | 2 | NC | NC | NC |
| 1686 | 2680 | TCTGAGTTAAGGATGTGGCT | 2 | NC | NC | NC |
| 1687 | 2681 | CTCTGAGTTAAGGATGTGGC | 2 | NC | NC | NC |
| 1688 | 2682 | TCTCTGAGTTAAGGATGTGG | 2 | NC | NC | NC |
| 1689 | 2683 | TTCTCTGAGTTAAGGATGTG | 2 | NC | NC | NC |
| 1690 | 2684 | CTTCTCTGAGTTAAGGATGT | 2 | NC | NC | NC |
| 1691 | 2685 | ACTTCTCTGAGTTAAGGATG | 2 | NC | NC | NC |
| 1692 | 2686 | AACTTCTCTGAGTTAAGGAT | 2 | NC | NC | NC |
| 1693 | 2687 | AAACTTCTCTGAGTTAAGGA | 2 | NC | NC | NC |
| 1694 | 2688 | GAAACTTCTCTGAGTTAAGG | 2 | NC | NC | NC |
| 1695 | 2689 | GGAAACTTCTCTGAGTTAAG | 2 | NC | NC | NC |
| 1696 | 2690 | TGGAAACTTCTCTGAGTTAA | 2 | NC | NC | NC |
| 1697 | 2691 | ATGGAAACTTCTCTGAGTTA | 2 | NC | NC | NC |
| 1698 | 2693 | GAATGGAAACTTCTCTGAGT | 2 | NC | NC | NC |
| 1699 | 2694 | AGAATGGAAACTTCTCTGAG | 2 | NC | NC | NC |
| 1700 | 2699 | CTTGGAGAATGGAAACTTCT | 1 | NC | NC | NC |
| 1701 | 2700 | CCTTGGAGAATGGAAACTTC | 2 | NC | NC | NC |
| 1702 | 2701 | TCCTTGGAGAATGGAAACTT | 1 | NC | NC | NC |
| 1703 | 2702 | ATCCTTGGAGAATGGAAACT | 2 | NC | NC | NC |
| 1704 | 2703 | CATCCTTGGAGAATGGAAAC | 2 | NC | NC | NC |
| 1705 | 2704 | TCATCCTTGGAGAATGGAAA | 1 | NC | NC | NC |
| 1706 | 2705 | TTCATCCTTGGAGAATGGAA | 2 | 2 | NC | NC |
| 1707 | 2706 | CTTCATCCTTGGAGAATGGA | 2 | 2 | NC | NC |
| 1708 | 2707 | TCTTCATCCTTGGAGAATGG | 2 | 2 | NC | NC |
| 1709 | 2708 | ATCTTCATCCTTGGAGAATG | 2 | 2 | NC | NC |
| 1710 | 2709 | AATCTTCATCCTTGGAGAAT | 2 | 2 | NC | NC |
| 1711 | 2710 | CAATCTTCATCCTTGGAGAA | 1 | 2 | NC | NC |
| 1712 | 2712 | AACAATCTTCATCCTTGGAG | 2 | 2 | NC | NC |
| 1713 | 2713 | AAACAATCTTCATCCTTGGA | 2 | 2 | NC | NC |
| 1714 | 2714 | TAAACAATCTTCATCCTTGG | 2 | 2 | NC | NC |
| 1715 | 2715 | CTAAACAATCTTCATCCTTG | 2 | 2 | NC | NC |
| 1716 | 2716 | TCTAAACAATCTTCATCCTT | 2 | 2 | NC | NC |
| 1717 | 2717 | TTCTAAACAATCTTCATCCT | 2 | 2 | NC | NC |
| 1718 | 2718 | GTTCTAAACAATCTTCATCC | 2 | 2 | NC | NC |
| 1719 | 2719 | TGTTCTAAACAATCTTCATC | 2 | 2 | NC | NC |
| 1720 | 2729 | AGGCATCTGTTGTTCTAAAC | 2 | 1 | NC | NC |
| 1721 | 2730 | TAGGCATCTGTTGTTCTAAA | 2 | 2 | NC | NC |
| 1722 | 2731 | CTAGGCATCTGTTGTTCTAA | 2 | 2 | NC | NC |
| 1723 | 2732 | ACTAGGCATCTGTTGTTCTA | 2 | 3 | NC | NC |
| 1724 | 2733 | AACTAGGCATCTGTTGTTCT | 2 | 2 | NC | NC |
| 1725 | 2734 | AAACTAGGCATCTGTTGTTC | 2 | 2 | NC | NC |
| 1726 | 2735 | CAAACTAGGCATCTGTTGTT | 2 | 1 | NC | NC |
| 1727 | 2736 | TCAAACTAGGCATCTGTTGT | 2 | 2 | NC | NC |
| 1728 | 2737 | CTCAAACTAGGCATCTGTTG | 2 | 3 | NC | NC |
| 1729 | 2738 | TCTCAAACTAGGCATCTGTT | 2 | 2 | NC | NC |
| 1730 | 2739 | CTCTCAAACTAGGCATCTGT | 1 | 2 | NC | NC |
| 1731 | 2740 | TCTCTCAAACTAGGCATCTG | 1 | 2 | NC | NC |
| 1732 | 2741 | TTCTCTCAAACTAGGCATCT | 1 | 2 | NC | NC |
| 1733 | 2742 | TTTCTCTCAAACTAGGCATC | 2 | 2 | NC | NC |
| 1734 | 2743 | CTTTCTCTCAAACTAGGCAT | 2 | 2 | NC | NC |
| 1735 | 2744 | ACTTTCTCTCAAACTAGGCA | 2 | NC | NC | NC |
| 1736 | 2745 | GACTTTCTCTCAAACTAGGC | 2 | NC | NC | NC |
| 1737 | 2746 | GGACTTTCTCTCAAACTAGG | 2 | NC | NC | NC |
| 1738 | 2747 | AGGACTTTCTCTCAAACTAG | 1 | NC | NC | NC |
| 1739 | 2748 | TAGGACTTTCTCTCAAACTA | 2 | NC | NC | NC |
| 1740 | 2749 | ATAGGACTTTCTCTCAAACT | 2 | NC | NC | NC |
| 1741 | 2750 | CATAGGACTTTCTCTCAAAC | 2 | NC | NC | NC |
| 1742 | 2751 | TCATAGGACTTTCTCTCAAA | 2 | NC | NC | NC |
| 1743 | 2763 | ACTCCTTCAGGGTCATAGGA | 2 | NC | NC | NC |
| 1744 | 2764 | AACTCCTTCAGGGTCATAGG | 2 | 2 | NC | NC |
| 1745 | 2765 | TAACTCCTTCAGGGTCATAG | 2 | 2 | NC | NC |
| 1746 | 2766 | ATAACTCCTTCAGGGTCATA | 2 | 2 | NC | NC |
| 1747 | 2767 | GATAACTCCTTCAGGGTCAT | 2 | 2 | NC | NC |
| 1748 | 2768 | AGATAACTCCTTCAGGGTCA | 2 | 2 | NC | NC |
| 1749 | 2769 | GAGATAACTCCTTCAGGGTC | 2 | 2 | NC | NC |
| 1750 | 2780 | TCTATTAAAGAGAGATAACT | 1 | 1 | NC | NC |
| 1751 | 2781 | TTCTATTAAAGAGAGATAAC | 2 | 2 | NC | NC |
| 1752 | 2784 | GTTTTCTATTAAAGAGAGAT | 1 | 0 | NC | NC |
| 1753 | 2785 | GGTTTTCTATTAAAGAGAGA | 2 | 1 | NC | NC |
| 1754 | 2786 | AGGTTTTCTATTAAAGAGAG | 2 | 2 | NC | NC |
| 1755 | 2787 | AAGGTTTTCTATTAAAGAGA | 2 | 2 | NC | NC |
| 1756 | 2788 | AAAGGTTTTCTATTAAAGAG | 1 | 2 | NC | NC |
| 1757 | 2789 | CAAAGGTTTTCTATTAAAGA | 1 | 1 | NC | NC |
| 1758 | 2790 | CCAAAGGTTTTCTATTAAAG | 1 | 2 | NC | NC |
| 1759 | 2791 | TCCAAAGGTTTTCTATTAAA | 1 | 1 | NC | NC |
| 1760 | 2792 | GTCCAAAGGTTTTCTATTAA | 2 | 1 | NC | NC |
| 1761 | 2793 | GGTCCAAAGGTTTTCTATTA | 2 | 2 | NC | NC |
| 1762 | 2794 | AGGTCCAAAGGTTTTCTATT | 2 | 2 | NC | NC |
| 1763 | 2795 | AAGGTCCAAAGGTTTTCTAT | 2 | 2 | NC | NC |
| 1764 | 2796 | CAAGGTCCAAAGGTTTTCTA | 2 | 2 | NC | NC |
| 1765 | 2797 | TCAAGGTCCAAAGGTTTTCT | 2 | 2 | NC | NC |
| 1766 | 2798 | CTCAAGGTCCAAAGGTTTTC | 2 | 2 | NC | NC |
| 1767 | 2799 | TCTCAAGGTCCAAAGGTTTT | 2 | 1 | NC | NC |
| 1768 | 2800 | TTCTCAAGGTCCAAAGGTTT | 2 | 2 | NC | NC |
| 1769 | 2801 | CTTCTCAAGGTCCAAAGGTT | 2 | 2 | NC | NC |
| 1770 | 2802 | ACTTCTCAAGGTCCAAAGGT | 2 | 2 | NC | NC |
| 1771 | 2803 | GACTTCTCAAGGTCCAAAGG | 2 | 1 | NC | NC |
| 1772 | 2804 | TGACTTCTCAAGGTCCAAAG | 1 | 1 | NC | NC |
| 1773 | 2805 | ATGACTTCTCAAGGTCCAAA | 1 | 1 | NC | NC |
| 1774 | 2806 | GATGACTTCTCAAGGTCCAA | 1 | 2 | NC | NC |
| 1775 | 2807 | AGATGACTTCTCAAGGTCCA | 1 | 2 | NC | NC |
| 1776 | 2808 | CAGATGACTTCTCAAGGTCC | 1 | 2 | NC | NC |
| 1777 | 2809 | TCAGATGACTTCTCAAGGTC | 2 | 2 | NC | NC |
| 1778 | 2810 | TTCAGATGACTTCTCAAGGT | 1 | 2 | NC | NC |
| 1779 | 2811 | ATTCAGATGACTTCTCAAGG | 1 | 2 | NC | NC |
| 1780 | 2812 | GATTCAGATGACTTCTCAAG | 2 | 2 | NC | NC |
| 1781 | 2813 | TGATTCAGATGACTTCTCAA | 2 | 2 | NC | NC |
| 1782 | 2814 | GTGATTCAGATGACTTCTCA | 2 | 2 | NC | NC |
| 1783 | 2815 | AGTGATTCAGATGACTTCTC | 2 | 2 | NC | NC |
| 1784 | 2816 | TAGTGATTCAGATGACTTCT | 2 | 2 | NC | NC |
| 1785 | 2817 | CTAGTGATTCAGATGACTTC | 2 | 2 | NC | NC |
| 1786 | 2818 | GCTAGTGATTCAGATGACTT | 2 | 2 | NC | NC |
| 1787 | 2819 | GGCTAGTGATTCAGATGACT | 3 | 2 | NC | NC |
| 1788 | 2820 | AGGCTAGTGATTCAGATGAC | 3 | 2 | NC | NC |
| 1789 | 2821 | GAGGCTAGTGATTCAGATGA | 3 | 2 | NC | NC |
| 1790 | 2822 | AGAGGCTAGTGATTCAGATG | 2 | 2 | NC | NC |
| 1791 | 2823 | TAGAGGCTAGTGATTCAGAT | 2 | 2 | NC | NC |
| 1792 | 2824 | TTAGAGGCTAGTGATTCAGA | 2 | 1 | NC | NC |
| 1793 | 2825 | TTTAGAGGCTAGTGATTCAG | 3 | 1 | NC | NC |
| 1794 | 2826 | ATTTAGAGGCTAGTGATTCA | 2 | 2 | NC | NC |
| 1795 | 2827 | AATTTAGAGGCTAGTGATTC | 2 | 2 | NC | NC |
| 1796 | 2828 | TAATTTAGAGGCTAGTGATT | 2 | 2 | NC | NC |
| 1797 | 2829 | ATAATTTAGAGGCTAGTGAT | 2 | 2 | NC | NC |
| 1798 | 2830 | GATAATTTAGAGGCTAGTGA | 2 | 2 | NC | NC |
| 1799 | 2831 | GGATAATTTAGAGGCTAGTG | 2 | 2 | NC | NC |
| 1800 | 2832 | TGGATAATTTAGAGGCTAGT | 3 | 3 | NC | NC |
| 1801 | 2833 | CTGGATAATTTAGAGGCTAG | 2 | 2 | NC | NC |
| 1802 | 2834 | TCTGGATAATTTAGAGGCTA | 2 | 2 | NC | NC |
| 1803 | 2835 | GTCTGGATAATTTAGAGGCT | 2 | 2 | NC | NC |
| 1804 | 2836 | AGTCTGGATAATTTAGAGGC | 2 | NC | NC | NC |
| 1805 | 2837 | CAGTCTGGATAATTTAGAGG | 2 | NC | NC | NC |
| 1806 | 2838 | TCAGTCTGGATAATTTAGAG | 2 | NC | NC | NC |
| 1807 | 2839 | TTCAGTCTGGATAATTTAGA | 2 | NC | NC | NC |
| 1808 | 2840 | CTTCAGTCTGGATAATTTAG | 2 | NC | NC | NC |
| 1809 | 2841 | CCTTCAGTCTGGATAATTTA | 2 | NC | NC | NC |
| 1810 | 2842 | CCCTTCAGTCTGGATAATTT | 2 | NC | NC | NC |
| 1811 | 2843 | ACCCTTCAGTCTGGATAATT | 2 | NC | NC | NC |
| 1812 | 2844 | AACCCTTCAGTCTGGATAAT | 2 | NC | NC | NC |
| 1813 | 2845 | GAACCCTTCAGTCTGGATAA | 2 | NC | NC | NC |
| 1814 | 2846 | GGAACCCTTCAGTCTGGATA | 3 | NC | NC | NC |
| 1815 | 2847 | CGGAACCCTTCAGTCTGGAT | 3 | NC | NC | NC |
| 1816 | 2848 | TCGGAACCCTTCAGTCTGGA | 3 | NC | NC | NC |
| 1817 | 2849 | TTCGGAACCCTTCAGTCTGG | 3 | NC | NC | NC |
| 1818 | 2850 | TTTCGGAACCCTTCAGTCTG | 2 | NC | NC | NC |
| 1819 | 2851 | CTTTCGGAACCCTTCAGTCT | 2 | NC | NC | NC |
| 1820 | 2852 | TCTTTCGGAACCCTTCAGTC | 3 | NC | NC | NC |
| 1821 | 2853 | CTCTTTCGGAACCCTTCAGT | 3 | NC | NC | NC |
| 1822 | 2854 | TCTCTTTCGGAACCCTTCAG | 2 | NC | NC | NC |
| 1823 | 2855 | TTCTCTTTCGGAACCCTTCA | 2 | NC | NC | NC |
| 1824 | 2856 | TTTCTCTTTCGGAACCCTTC | 3 | 2 | NC | NC |
| 1825 | 2857 | GTTTCTCTTTCGGAACCCTT | 2 | 2 | NC | NC |
| 1826 | 2858 | AGTTTCTCTTTCGGAACCCT | 2 | 2 | NC | NC |
| 1827 | 2859 | GAGTTTCTCTTTCGGAACCC | 3 | 2 | NC | NC |
| 1828 | 2860 | TGAGTTTCTCTTTCGGAACC | 1 | 2 | NC | NC |
| 1829 | 2861 | TTGAGTTTCTCTTTCGGAAC | 2 | 2 | NC | NC |
| 1830 | 2862 | TTTGAGTTTCTCTTTCGGAA | 1 | 1 | NC | NC |
| 1831 | 2863 | GTTTGAGTTTCTCTTTCGGA | 2 | 2 | NC | NC |
| 1832 | 2864 | TGTTTGAGTTTCTCTTTCGG | 2 | 2 | NC | NC |
| 1833 | 2865 | TTGTTTGAGTTTCTCTTTCG | 1 | 2 | NC | NC |
| 1834 | 2866 | ATTGTTTGAGTTTCTCTTTC | 1 | 1 | NC | NC |
| 1835 | 2867 | CATTGTTTGAGTTTCTCTTT | 2 | 2 | NC | NC |
| 1836 | 2868 | CCATTGTTTGAGTTTCTCTT | 2 | 2 | NC | NC |
| 1837 | 2869 | CCCATTGTTTGAGTTTCTCT | 2 | NC | NC | NC |
| 1838 | 2870 | CCCCATTGTTTGAGTTTCTC | 2 | NC | NC | NC |
| 1839 | 2871 | TCCCCATTGTTTGAGTTTCT | 1 | NC | NC | NC |
| 1840 | 2872 | ATCCCCATTGTTTGAGTTTC | 2 | NC | NC | NC |
| 1841 | 2873 | CATCCCCATTGTTTGAGTTT | 2 | NC | NC | NC |
| 1842 | 2874 | TCATCCCCATTGTTTGAGTT | 1 | NC | NC | NC |
| 1843 | 2875 | ATCATCCCCATTGTTTGAGT | 2 | NC | NC | NC |
| 1844 | 2876 | CATCATCCCCATTGTTTGAG | 1 | NC | NC | NC |
| 1845 | 2877 | TCATCATCCCCATTGTTTGA | 2 | NC | NC | NC |
| 1846 | 2878 | CTCATCATCCCCATTGTTTG | 2 | NC | NC | NC |
| 1847 | 2879 | ACTCATCATCCCCATTGTTT | 2 | NC | NC | NC |
| 1848 | 2880 | GACTCATCATCCCCATTGTT | 2 | NC | NC | NC |
| 1849 | 2881 | CGACTCATCATCCCCATTGT | 2 | NC | NC | NC |
| 1850 | 2882 | ACGACTCATCATCCCCATTG | 1 | NC | NC | NC |
| 1851 | 2883 | AACGACTCATCATCCCCATT | 2 | NC | NC | NC |
| 1852 | 2884 | AAACGACTCATCATCCCCAT | 2 | NC | NC | NC |
| 1853 | 2885 | AAAACGACTCATCATCCCCA | 2 | NC | NC | NC |
| 1854 | 2886 | TAAAACGACTCATCATCCCC | 2 | NC | NC | NC |
| 1855 | 2887 | TTAAAACGACTCATCATCCC | 1 | NC | NC | NC |
| 1856 | 2888 | ATTAAAACGACTCATCATCC | 0 | NC | NC | NC |
| 1857 | 2889 | CATTAAAACGACTCATCATC | 0 | 2 | NC | NC |
| 1858 | 2890 | TCATTAAAACGACTCATCAT | 1 | 2 | NC | NC |
| 1859 | 2891 | TTCATTAAAACGACTCATCA | 2 | 2 | NC | NC |
| 1860 | 2892 | GTTCATTAAAACGACTCATC | 2 | 2 | NC | NC |
| 1861 | 2893 | AGTTCATTAAAACGACTCAT | 2 | 2 | NC | NC |
| 1862 | 2894 | AAGTTCATTAAAACGACTCA | 2 | 2 | NC | NC |
| 1863 | 2895 | GAAGTTCATTAAAACGACTC | 2 | 3 | NC | NC |
| 1864 | 2896 | GGAAGTTCATTAAAACGACT | 2 | 2 | NC | NC |
| 1865 | 2897 | TGGAAGTTCATTAAAACGAC | 3 | 3 | NC | NC |
| 1866 | 2898 | TTGGAAGTTCATTAAAACGA | 2 | 2 | NC | NC |
| 1867 | 2899 | TTTGGAAGTTCATTAAAACG | 1 | 2 | NC | NC |
| 1868 | 2900 | ATTTGGAAGTTCATTAAAAC | 1 | 2 | NC | NC |
| 1869 | 2902 | GAATTTGGAAGTTCATTAAA | 2 | 2 | NC | NC |
| 1870 | 2903 | TGAATTTGGAAGTTCATTAA | 2 | 2 | NC | NC |
| 1871 | 2904 | CTGAATTTGGAAGTTCATTA | 2 | 2 | NC | NC |
| 1872 | 2905 | TCTGAATTTGGAAGTTCATT | 2 | 1 | NC | NC |
| 1873 | 2906 | ATCTGAATTTGGAAGTTCAT | 2 | 2 | NC | NC |
| 1874 | 2907 | AATCTGAATTTGGAAGTTCA | 2 | 2 | NC | NC |
| 1875 | 2908 | GAATCTGAATTTGGAAGTTC | 2 | 2 | NC | NC |
| 1876 | 2909 | GGAATCTGAATTTGGAAGTT | 2 | 2 | NC | NC |
| 1877 | 2910 | TGGAATCTGAATTTGGAAGT | 1 | 1 | NC | NC |
| 1878 | 2911 | CTGGAATCTGAATTTGGAAG | 2 | 2 | NC | NC |
| 1879 | 2912 | ACTGGAATCTGAATTTGGAA | 2 | 2 | NC | NC |
| 1880 | 2913 | TACTGGAATCTGAATTTGGA | 2 | 2 | NC | NC |
| 1881 | 2914 | CTACTGGAATCTGAATTTGG | 2 | 2 | NC | NC |
| 1882 | 2915 | CCTACTGGAATCTGAATTTG | 2 | 2 | NC | NC |
| 1883 | 2927 | CTTGCTGTCTTTCCTACTGG | 2 | NC | NC | NC |
| 1884 | 2928 | ACTTGCTGTCTTTCCTACTG | 2 | NC | NC | NC |
| 1885 | 2929 | AACTTGCTGTCTTTCCTACT | 2 | NC | NC | NC |
| 1886 | 2930 | CAACTTGCTGTCTTTCCTAC | 1 | NC | NC | NC |
| 1887 | 2931 | ACAACTTGCTGTCTTTCCTA | 1 | NC | NC | NC |
| 1888 | 2932 | CACAACTTGCTGTCTTTCCT | 2 | NC | NC | NC |
| 1889 | 2943 | TTAACACACTGCACAACTTG | 2 | 2 | NC | NC |
| 1890 | 2944 | GTTAACACACTGCACAACTT | 1 | 2 | NC | NC |
| 1891 | 2945 | TGTTAACACACTGCACAACT | 1 | 2 | NC | NC |
| 1892 | 2957 | ACAAAAATCTTGTGTTAACA | 2 | 2 | NC | NC |
| 1893 | 2958 | TACAAAAATCTTGTGTTAAC | 2 | 2 | NC | NC |
| 1894 | 2960 | CATACAAAAATCTTGTGTTA | 2 | 1 | NC | NC |
| 1895 | 2961 | ACATACAAAAATCTTGTGTT | 2 | 1 | NC | NC |
| 1896 | 2962 | AACATACAAAAATCTTGTGT | 2 | 1 | NC | NC |
| 1897 | 2963 | TAACATACAAAAATCTTGTG | 1 | 2 | NC | NC |
| 1898 | 2980 | TCATGCTTGTTGTTAAATAA | 2 | NC | NC | NC |
| 1899 | 2981 | TTCATGCTTGTTGTTAAATA | 2 | NC | NC | NC |
| 1900 | 2982 | TTTCATGCTTGTTGTTAAAT | 1 | NC | NC | NC |
| 1901 | 2983 | TTTTCATGCTTGTTGTTAAA | 1 | NC | NC | NC |
| 1902 | 2984 | TTTTTCATGCTTGTTGTTAA | 1 | NC | NC | NC |
| 1903 | 3000 | TGACACCATTCTCTGTTTTT | 2 | 2 | NC | NC |
| 1904 | 3001 | ATGACACCATTCTCTGTTTT | 2 | 2 | NC | NC |
| 1905 | 3002 | GATGACACCATTCTCTGTTT | 2 | 2 | NC | NC |
| 1906 | 3003 | GGATGACACCATTCTCTGTT | 2 | 3 | NC | NC |
| 1907 | 3004 | GGGATGACACCATTCTCTGT | 2 | 2 | NC | NC |
| 1908 | 3005 | TGGGATGACACCATTCTCTG | 2 | 2 | NC | NC |
| 1909 | 3006 | TTGGGATGACACCATTCTCT | 1 | 1 | NC | NC |
| 1910 | 3007 | GTTGGGATGACACCATTCTC | 2 | 2 | NC | NC |
| 1911 | 3008 | TGTTGGGATGACACCATTCT | 2 | 2 | NC | NC |
| 1912 | 3009 | ATGTTGGGATGACACCATTC | 2 | 2 | NC | NC |
| 1913 | 3010 | GATGTTGGGATGACACCATT | 2 | 3 | NC | NC |
| 1914 | 3011 | TGATGTTGGGATGACACCAT | 2 | 2 | NC | NC |
| 1915 | 3012 | CTGATGTTGGGATGACACCA | 2 | 2 | NC | NC |
| 1916 | 3013 | TCTGATGTTGGGATGACACC | 2 | 2 | NC | NC |
| 1917 | 3014 | ATCTGATGTTGGGATGACAC | 2 | 2 | NC | NC |
| 1918 | 3015 | AATCTGATGTTGGGATGACA | 2 | 2 | NC | NC |
| 1919 | 3016 | GAATCTGATGTTGGGATGAC | 2 | 2 | NC | NC |
| 1920 | 3017 | AGAATCTGATGTTGGGATGA | 2 | 2 | NC | NC |
| 1921 | 3018 | CAGAATCTGATGTTGGGATG | 2 | 2 | NC | NC |
| 1922 | 3019 | GCAGAATCTGATGTTGGGAT | 2 | 2 | NC | NC |
| 1923 | 3020 | GGCAGAATCTGATGTTGGGA | 2 | 2 | NC | NC |
| 1924 | 3021 | TGGCAGAATCTGATGTTGGG | 2 | 1 | NC | NC |
| 1925 | 3022 | GTGGCAGAATCTGATGTTGG | 2 | 2 | NC | NC |
| 1926 | 3023 | TGTGGCAGAATCTGATGTTG | 2 | 2 | NC | NC |
| 1927 | 3024 | GTGTGGCAGAATCTGATGTT | 2 | 2 | NC | NC |
| 1928 | 3025 | TGTGTGGCAGAATCTGATGT | 2 | 1 | NC | NC |
| 1929 | 3065 | GTTAGAATGTGTTTTACTAT | 1 | 1 | NC | NC |
| 1930 | 3066 | TGTTAGAATGTGTTTTACTA | 2 | 2 | NC | NC |
| 1931 | 3067 | CTGTTAGAATGTGTTTTACT | 2 | 2 | NC | NC |
| 1932 | 3068 | GCTGTTAGAATGTGTTTTAC | 2 | 2 | NC | NC |
| 1933 | 3069 | TGCTGTTAGAATGTGTTTTA | 2 | 1 | NC | NC |
| 1934 | 3070 | TTGCTGTTAGAATGTGTTTT | 2 | 2 | NC | NC |
| 1935 | 3071 | ATTGCTGTTAGAATGTGTTT | 2 | 2 | NC | NC |
| 1936 | 3072 | TATTGCTGTTAGAATGTGTT | 2 | 2 | NC | NC |
| 1937 | 3073 | GTATTGCTGTTAGAATGTGT | 2 | 2 | NC | NC |
| 1938 | 3074 | TGTATTGCTGTTAGAATGTG | 2 | 2 | NC | NC |
| 1939 | 3075 | TTGTATTGCTGTTAGAATGT | 2 | 2 | NC | NC |
| 1940 | 3076 | GTTGTATTGCTGTTAGAATG | 2 | 2 | NC | NC |
| 1941 | 3077 | TGTTGTATTGCTGTTAGAAT | 2 | 2 | NC | NC |
| 1942 | 3078 | CTGTTGTATTGCTGTTAGAA | 2 | 2 | NC | NC |
| 1943 | 3079 | TCTGTTGTATTGCTGTTAGA | 2 | 2 | NC | NC |
| 1944 | 3080 | CTCTGTTGTATTGCTGTTAG | 2 | 2 | NC | NC |
| 1945 | 3081 | TCTCTGTTGTATTGCTGTTA | 2 | 2 | NC | NC |
| 1946 | 3082 | TTCTCTGTTGTATTGCTGTT | 2 | 2 | NC | NC |
| 1947 | 3083 | GTTCTCTGTTGTATTGCTGT | 2 | 2 | NC | NC |
| 1948 | 3084 | AGTTCTCTGTTGTATTGCTG | 2 | 1 | NC | NC |
| 1949 | 3085 | CAGTTCTCTGTTGTATTGCT | 2 | 2 | NC | NC |
| 1950 | 3096 | CTGATATCACACAGTTCTCT | 2 | 2 | NC | NC |
| 1951 | 3097 | TCTGATATCACACAGTTCTC | 2 | 2 | NC | NC |
| 1952 | 3098 | TTCTGATATCACACAGTTCT | 2 | 1 | NC | NC |
| 1953 | 3099 | TTTCTGATATCACACAGTTC | 2 | 2 | NC | NC |
| 1954 | 3100 | GTTTCTGATATCACACAGTT | 2 | 2 | NC | NC |
| 1955 | 3101 | AGTTTCTGATATCACACAGT | 2 | 2 | NC | NC |
| 1956 | 3102 | GAGTTTCTGATATCACACAG | 2 | 2 | NC | NC |
| 1957 | 3103 | GGAGTTTCTGATATCACACA | 2 | 2 | NC | NC |
| 1958 | 3104 | AGGAGTTTCTGATATCACAC | 2 | 2 | NC | NC |
| 1959 | 3105 | AAGGAGTTTCTGATATCACA | 2 | 2 | NC | NC |
| 1960 | 3106 | AAAGGAGTTTCTGATATCAC | 2 | 2 | NC | NC |
| 1961 | 3107 | CAAAGGAGTTTCTGATATCA | 1 | 2 | NC | NC |
| 1962 | 3108 | CCAAAGGAGTTTCTGATATC | 1 | 2 | NC | NC |
| 1963 | 3109 | ACCAAAGGAGTTTCTGATAT | 2 | 2 | NC | NC |
| 1964 | 3110 | TACCAAAGGAGTTTCTGATA | 2 | 2 | NC | NC |
| 1965 | 3111 | ATACCAAAGGAGTTTCTGAT | 2 | 2 | NC | NC |
| 1966 | 3112 | AATACCAAAGGAGTTTCTGA | 1 | 1 | NC | NC |
| 1967 | 3113 | CAATACCAAAGGAGTTTCTG | 1 | 1 | NC | NC |
| 1968 | 3114 | GCAATACCAAAGGAGTTTCT | 2 | 2 | NC | NC |
| 1969 | 3127 | GAATTATTATAGGGCAATAC | 2 | NC | NC | NC |
| 1970 | 3128 | AGAATTATTATAGGGCAATA | 2 | NC | NC | NC |
| 1971 | 3129 | TAGAATTATTATAGGGCAAT | 1 | NC | NC | NC |
| 1972 | 3130 | TTAGAATTATTATAGGGCAA | 1 | NC | NC | NC |
| 1973 | 3131 | TTTAGAATTATTATAGGGCA | 2 | NC | NC | NC |
| 1974 | 3132 | CTTTAGAATTATTATAGGGC | 2 | NC | NC | NC |
| 1975 | 3133 | ACTTTAGAATTATTATAGGG | 2 | NC | NC | NC |
| 1976 | 3138 | CGGTAACTTTAGAATTATTA | 2 | NC | NC | NC |
| 1977 | 3139 | CCGGTAACTTTAGAATTATT | 2 | NC | NC | NC |
| 1978 | 3140 | ACCGGTAACTTTAGAATTAT | 2 | NC | NC | NC |
| 1979 | 3141 | TACCGGTAACTTTAGAATTA | 2 | NC | NC | NC |
| 1980 | 3142 | TTACCGGTAACTTTAGAATT | 1 | NC | NC | NC |
| 1981 | 3143 | TTTACCGGTAACTTTAGAAT | 2 | NC | NC | NC |
| 1982 | 3144 | CTTTACCGGTAACTTTAGAA | 3 | NC | NC | NC |
| 1983 | 3145 | TCTTTACCGGTAACTTTAGA | 2 | NC | NC | NC |
| 1984 | 3146 | ATCTTTACCGGTAACTTTAG | 2 | NC | NC | NC |
| 1985 | 3147 | AATCTTTACCGGTAACTTTA | 2 | NC | NC | NC |
| 1986 | 3148 | GAATCTTTACCGGTAACTTT | 3 | NC | NC | NC |
| 1987 | 3149 | TGAATCTTTACCGGTAACTT | 2 | NC | NC | NC |
| 1988 | 3150 | CTGAATCTTTACCGGTAACT | 3 | NC | NC | NC |
| 1989 | 3151 | TCTGAATCTTTACCGGTAAC | 2 | NC | NC | NC |
| 1990 | 3152 | ATCTGAATCTTTACCGGTAA | 3 | NC | NC | NC |
| 1991 | 3153 | CATCTGAATCTTTACCGGTA | 3 | NC | NC | NC |
| 1992 | 3154 | ACATCTGAATCTTTACCGGT | 3 | NC | NC | NC |
| 1993 | 3155 | AACATCTGAATCTTTACCGG | 2 | NC | NC | NC |
| 1994 | 3156 | GAACATCTGAATCTTTACCG | 2 | NC | NC | NC |
| 1995 | 3157 | AGAACATCTGAATCTTTACC | 2 | NC | NC | NC |
| 1996 | 3158 | AAGAACATCTGAATCTTTAC | 2 | 2 | NC | NC |
| 1997 | 3159 | TAAGAACATCTGAATCTTTA | 2 | 2 | NC | NC |
| 1998 | 3160 | ATAAGAACATCTGAATCTTT | 1 | 2 | NC | NC |
| 1999 | 3161 | GATAAGAACATCTGAATCTT | 2 | 2 | NC | NC |
| 2000 | 3162 | TGATAAGAACATCTGAATCT | 1 | 2 | 2 | 1 |
| 2001 | 3163 | CTGATAAGAACATCTGAATC | 2 | 2 | 1 | 2 |
| 2002 | 3164 | TCTGATAAGAACATCTGAAT | 2 | 2 | 1 | 2 |
| 2003 | 3165 | CTCTGATAAGAACATCTGAA | 1 | 2 | NC | NC |
| 2004 | 3166 | GCTCTGATAAGAACATCTGA | 2 | 2 | NC | NC |
| 2005 | 3167 | GGCTCTGATAAGAACATCTG | 2 | NC | NC | NC |
| 2006 | 3168 | AGGCTCTGATAAGAACATCT | 2 | NC | NC | NC |
| 2007 | 3169 | GAGGCTCTGATAAGAACATC | 1 | NC | NC | NC |
| 2008 | 3170 | TGAGGCTCTGATAAGAACAT | 1 | NC | NC | NC |
| 2009 | 3171 | CTGAGGCTCTGATAAGAACA | 2 | NC | NC | NC |
| 2010 | 3172 | TCTGAGGCTCTGATAAGAAC | 2 | NC | NC | NC |
| 2011 | 3173 | TTCTGAGGCTCTGATAAGAA | 2 | NC | NC | NC |
| 2012 | 3174 | GTTCTGAGGCTCTGATAAGA | 1 | NC | NC | NC |
| 2013 | 3175 | TGTTCTGAGGCTCTGATAAG | 1 | NC | NC | NC |
| 2014 | 3176 | TTGTTCTGAGGCTCTGATAA | 1 | NC | NC | NC |
| 2015 | 3177 | GTTGTTCTGAGGCTCTGATA | 1 | NC | NC | NC |
| 2016 | 3178 | TGTTGTTCTGAGGCTCTGAT | 2 | NC | NC | NC |
| 2017 | 3179 | CTGTTGTTCTGAGGCTCTGA | 2 | NC | NC | NC |
| 2018 | 3180 | TCTGTTGTTCTGAGGCTCTG | 2 | NC | NC | NC |
| 2019 | 3181 | ATCTGTTGTTCTGAGGCTCT | 2 | NC | NC | NC |
| 2020 | 3182 | TATCTGTTGTTCTGAGGCTC | 1 | NC | NC | NC |
| 2021 | 3183 | CTATCTGTTGTTCTGAGGCT | 1 | NC | NC | NC |
| 2022 | 3184 | CCTATCTGTTGTTCTGAGGC | 2 | NC | NC | NC |
| 2023 | 3185 | TCCTATCTGTTGTTCTGAGG | 2 | NC | NC | NC |
| 2024 | 3186 | TTCCTATCTGTTGTTCTGAG | 1 | NC | NC | NC |
| 2025 | 3187 | CTTCCTATCTGTTGTTCTGA | 2 | NC | NC | NC |
| 2026 | 3188 | ACTTCCTATCTGTTGTTCTG | 2 | NC | NC | NC |
| 2027 | 3189 | GACTTCCTATCTGTTGTTCT | 2 | NC | NC | NC |
| 2028 | 3190 | AGACTTCCTATCTGTTGTTC | 2 | NC | NC | NC |
| 2029 | 3191 | AAGACTTCCTATCTGTTGTT | 2 | NC | NC | NC |
| 2030 | 3192 | CAAGACTTCCTATCTGTTGT | 2 | NC | NC | NC |
| 2031 | 3193 | TCAAGACTTCCTATCTGTTG | 2 | NC | NC | NC |
| 2032 | 3194 | GTCAAGACTTCCTATCTGTT | 2 | NC | NC | NC |
| 2033 | 3195 | AGTCAAGACTTCCTATCTGT | 2 | NC | NC | NC |
| 2034 | 3206 | TCCACTGGGAGAGTCAAGAC | 2 | NC | NC | NC |
| 2035 | 3217 | TTCATTAACATTCCACTGGG | 2 | 2 | NC | NC |
| 2036 | 3218 | ATTCATTAACATTCCACTGG | 1 | 2 | NC | NC |
| 2037 | 3219 | GATTCATTAACATTCCACTG | 1 | 1 | NC | NC |
| 2038 | 3220 | GGATTCATTAACATTCCACT | 2 | NC | NC | NC |
| 2039 | 3221 | CGGATTCATTAACATTCCAC | 2 | NC | NC | NC |
| 2040 | 3222 | CCGGATTCATTAACATTCCA | 3 | NC | NC | NC |
| 2041 | 3223 | ACCGGATTCATTAACATTCC | 2 | NC | NC | NC |
| 2042 | 3224 | TACCGGATTCATTAACATTC | 3 | NC | NC | NC |
| 2043 | 3225 | CTACCGGATTCATTAACATT | 3 | NC | NC | NC |
| 2044 | 3226 | TCTACCGGATTCATTAACAT | 3 | NC | NC | NC |
| 2045 | 3227 | TTCTACCGGATTCATTAACA | 2 | NC | NC | NC |
| 2046 | 3228 | CTTCTACCGGATTCATTAAC | 3 | NC | NC | NC |
| 2047 | 3229 | TCTTCTACCGGATTCATTAA | 2 | NC | NC | NC |
| 2048 | 3230 | ATCTTCTACCGGATTCATTA | 2 | NC | NC | NC |
| 2049 | 3231 | CATCTTCTACCGGATTCATT | 2 | NC | NC | NC |
| 2050 | 3232 | GCATCTTCTACCGGATTCAT | 2 | NC | NC | NC |
| 2051 | 3233 | GGCATCTTCTACCGGATTCA | 2 | NC | NC | NC |
| 2052 | 3234 | TGGCATCTTCTACCGGATTC | 2 | NC | NC | NC |
| 2053 | 3235 | GTGGCATCTTCTACCGGATT | 2 | NC | NC | NC |
| 2054 | 3236 | TGTGGCATCTTCTACCGGAT | 2 | NC | NC | NC |
| 2055 | 3237 | CTGTGGCATCTTCTACCGGA | 2 | NC | NC | NC |
| 2056 | 3239 | ACCTGTGGCATCTTCTACCG | 2 | NC | NC | NC |
| 2057 | 3240 | CACCTGTGGCATCTTCTACC | 2 | NC | NC | NC |
| 2058 | 3241 | TCACCTGTGGCATCTTCTAC | 2 | NC | NC | NC |
| 2059 | 3242 | GTCACCTGTGGCATCTTCTA | 2 | NC | NC | NC |
| 2060 | 3243 | GGTCACCTGTGGCATCTTCT | 1 | NC | NC | NC |
| 2061 | 3244 | TGGTCACCTGTGGCATCTTC | 1 | NC | NC | NC |
| 2062 | 3245 | TTGGTCACCTGTGGCATCTT | 2 | NC | NC | NC |
| 2063 | 3246 | TTTGGTCACCTGTGGCATCT | 2 | NC | NC | NC |
| 2064 | 3247 | TTTTGGTCACCTGTGGCATC | 2 | 2 | NC | NC |
| 2065 | 3248 | ATTTTGGTCACCTGTGGCAT | 2 | 2 | NC | NC |
| 2066 | 3249 | CATTTTGGTCACCTGTGGCA | 2 | 2 | NC | NC |
| 2067 | 3250 | CCATTTTGGTCACCTGTGGC | 2 | 3 | NC | NC |
| 2068 | 3263 | CTGAAAACAAATTCCATTTT | 1 | NC | NC | NC |
| 2069 | 3264 | TCTGAAAACAAATTCCATTT | 1 | NC | NC | NC |
| 2070 | 3265 | CTCTGAAAACAAATTCCATT | 1 | NC | NC | NC |
| 2071 | 3266 | ACTCTGAAAACAAATTCCAT | 2 | NC | NC | NC |
| 2072 | 3267 | CACTCTGAAAACAAATTCCA | 1 | NC | NC | NC |
| 2073 | 3268 | TCACTCTGAAAACAAATTCC | 2 | NC | NC | NC |
| 2074 | 3269 | CTCACTCTGAAAACAAATTC | 2 | NC | NC | NC |
| 2075 | 3270 | CCTCACTCTGAAAACAAATT | 2 | NC | NC | NC |
| 2076 | 3271 | TCCTCACTCTGAAAACAAAT | 2 | NC | NC | NC |
| 2077 | 3272 | TTCCTCACTCTGAAAACAAA | 2 | NC | NC | NC |
| 2078 | 3273 | ATTCCTCACTCTGAAAACAA | 2 | NC | NC | NC |
| 2079 | 3274 | GATTCCTCACTCTGAAAACA | 2 | NC | NC | NC |
| 2080 | 3275 | AGATTCCTCACTCTGAAAAC | 2 | NC | NC | NC |
| 2081 | 3276 | TAGATTCCTCACTCTGAAAA | 2 | NC | NC | NC |
| 2082 | 3277 | TTAGATTCCTCACTCTGAAA | 2 | NC | NC | NC |
| 2083 | 3278 | TTTAGATTCCTCACTCTGAA | 2 | NC | NC | NC |
| 2084 | 3279 | CTTTAGATTCCTCACTCTGA | 2 | NC | NC | NC |
| 2085 | 3280 | GCTTTAGATTCCTCACTCTG | 1 | NC | NC | NC |
| 2086 | 3281 | TGCTTTAGATTCCTCACTCT | 2 | NC | NC | NC |
| 2087 | 3282 | TTGCTTTAGATTCCTCACTC | 2 | NC | NC | NC |
| 2088 | 3283 | CTTGCTTTAGATTCCTCACT | 1 | 2 | NC | NC |
| 2089 | 3284 | TCTTGCTTTAGATTCCTCAC | 1 | 2 | NC | NC |
| 2090 | 3285 | CTCTTGCTTTAGATTCCTCA | 2 | 1 | NC | NC |
| 2091 | 3286 | GCTCTTGCTTTAGATTCCTC | 2 | 2 | NC | NC |
| 2092 | 3300 | CAGTTTCAGAACAAGCTCTT | 2 | 2 | NC | NC |
| 2093 | 3301 | TCAGTTTCAGAACAAGCTCT | 2 | 1 | NC | NC |
| 2094 | 3302 | TTCAGTTTCAGAACAAGCTC | 2 | 2 | NC | NC |
| 2095 | 3303 | CTTCAGTTTCAGAACAAGCT | 2 | 2 | NC | NC |
| 2096 | 3304 | TCTTCAGTTTCAGAACAAGC | 1 | 2 | NC | NC |
| 2097 | 3305 | CTCTTCAGTTTCAGAACAAG | 1 | 1 | NC | NC |
| 2098 | 3306 | ACTCTTCAGTTTCAGAACAA | 2 | 2 | NC | NC |
| 2099 | 3307 | GACTCTTCAGTTTCAGAACA | 2 | 2 | NC | NC |
| 2100 | 3308 | TGACTCTTCAGTTTCAGAAC | 2 | 2 | NC | NC |
| 2101 | 3309 | TTGACTCTTCAGTTTCAGAA | 2 | 2 | NC | NC |
| 2102 | 3310 | TTTGACTCTTCAGTTTCAGA | 2 | 2 | NC | NC |
| 2103 | 3311 | GTTTGACTCTTCAGTTTCAG | 2 | 2 | NC | NC |
| 2104 | 3312 | TGTTTGACTCTTCAGTTTCA | 2 | 2 | NC | NC |
| 2105 | 3313 | GTGTTTGACTCTTCAGTTTC | 2 | 2 | NC | NC |
| 2106 | 3314 | CGTGTTTGACTCTTCAGTTT | 2 | 2 | NC | NC |
| 2107 | 3315 | ACGTGTTTGACTCTTCAGTT | 2 | 2 | NC | NC |
| 2108 | 3316 | CACGTGTTTGACTCTTCAGT | 2 | 2 | NC | NC |
| 2109 | 3317 | ACACGTGTTTGACTCTTCAG | 2 | 2 | NC | NC |
| 2110 | 3318 | AACACGTGTTTGACTCTTCA | 3 | 2 | NC | NC |
| 2111 | 3330 | GCCAATCTGAACAACACGTG | 2 | NC | NC | NC |
| 2112 | 3331 | TGCCAATCTGAACAACACGT | 2 | NC | NC | NC |
| 2113 | 3332 | CTGCCAATCTGAACAACACG | 2 | NC | NC | NC |
| 2114 | 3333 | GCTGCCAATCTGAACAACAC | 1 | NC | NC | NC |
| 2115 | 3334 | CGCTGCCAATCTGAACAACA | 2 | NC | NC | NC |
| 2116 | 3335 | CCGCTGCCAATCTGAACAAC | 2 | NC | NC | NC |
| 2117 | 3336 | GCCGCTGCCAATCTGAACAA | 2 | NC | NC | NC |
| 2118 | 3337 | TGCCGCTGCCAATCTGAACA | 2 | NC | NC | NC |
| 2119 | 3338 | ATGCCGCTGCCAATCTGAAC | 2 | NC | NC | NC |
| 2120 | 3339 | AATGCCGCTGCCAATCTGAA | 1 | NC | NC | NC |
| 2121 | 3340 | AAATGCCGCTGCCAATCTGA | 1 | NC | NC | NC |
| 2122 | 3341 | GAAATGCCGCTGCCAATCTG | 2 | NC | NC | NC |
| 2123 | 3342 | CGAAATGCCGCTGCCAATCT | 2 | NC | NC | NC |
| 2124 | 3343 | TCGAAATGCCGCTGCCAATC | 2 | NC | NC | NC |
| 2125 | 3344 | ATCGAAATGCCGCTGCCAAT | 2 | NC | NC | NC |
| 2126 | 3345 | CATCGAAATGCCGCTGCCAA | 3 | NC | NC | NC |
| 2127 | 3346 | ACATCGAAATGCCGCTGCCA | 2 | NC | NC | NC |
| 2128 | 3347 | TACATCGAAATGCCGCTGCC | 3 | NC | NC | NC |
| 2129 | 3348 | CTACATCGAAATGCCGCTGC | 3 | NC | NC | NC |
| 2130 | 3349 | GCTACATCGAAATGCCGCTG | 3 | NC | NC | NC |
| 2131 | 3350 | GGCTACATCGAAATGCCGCT | 3 | NC | NC | NC |
| 2132 | 3354 | CCAGGGCTACATCGAAATGC | 3 | 2 | NC | NC |
| 2133 | 3356 | TCCCAGGGCTACATCGAAAT | 3 | NC | NC | NC |
| 2134 | 3357 | TTCCCAGGGCTACATCGAAA | 2 | NC | NC | NC |
| 2135 | 3358 | CTTCCCAGGGCTACATCGAA | 2 | NC | NC | NC |
| 2136 | 3359 | TCTTCCCAGGGCTACATCGA | 2 | NC | NC | NC |
| 2137 | 3360 | TTCTTCCCAGGGCTACATCG | 2 | NC | NC | NC |
| 2138 | 3361 | ATTCTTCCCAGGGCTACATC | 2 | NC | NC | NC |
| 2139 | 3362 | CATTCTTCCCAGGGCTACAT | 1 | NC | NC | NC |
| 2140 | 3363 | CCATTCTTCCCAGGGCTACA | 1 | NC | NC | NC |
| 2141 | 3364 | ACCATTCTTCCCAGGGCTAC | 1 | NC | NC | NC |
| 2142 | 3365 | AACCATTCTTCCCAGGGCTA | 2 | NC | NC | NC |
| 2143 | 3366 | AAACCATTCTTCCCAGGGCT | 2 | NC | NC | NC |
| 2144 | 3367 | TAAACCATTCTTCCCAGGGC | 2 | NC | NC | NC |
| 2145 | 3368 | ATAAACCATTCTTCCCAGGG | 2 | NC | NC | NC |
| 2146 | 3369 | CATAAACCATTCTTCCCAGG | 2 | NC | NC | NC |
| 2147 | 3370 | ACATAAACCATTCTTCCCAG | 2 | NC | NC | NC |
| 2148 | 3371 | GACATAAACCATTCTTCCCA | 2 | NC | NC | NC |
| 2149 | 3372 | TGACATAAACCATTCTTCCC | 2 | NC | NC | NC |
| 2150 | 3373 | TTGACATAAACCATTCTTCC | 2 | NC | NC | NC |
| 2151 | 3374 | GTTGACATAAACCATTCTTC | 2 | NC | NC | NC |
| 2152 | 3375 | TGTTGACATAAACCATTCTT | 2 | NC | NC | NC |
| 2153 | 3376 | TTGTTGACATAAACCATTCT | 2 | 2 | NC | NC |
| 2154 | 3377 | TTTGTTGACATAAACCATTC | 2 | 2 | NC | NC |
| 2155 | 3378 | TTTTGTTGACATAAACCATT | 2 | 2 | NC | NC |
| 2156 | 3379 | ATTTTGTTGACATAAACCAT | 2 | 2 | NC | NC |
| 2157 | 3380 | CATTTTGTTGACATAAACCA | 2 | 2 | NC | NC |
| 2158 | 3381 | TCATTTTGTTGACATAAACC | 2 | 2 | NC | NC |
| 2159 | 3389 | GAGTCCAGTCATTTTGTTGA | 2 | 2 | NC | NC |
| 2160 | 3390 | TGAGTCCAGTCATTTTGTTG | 2 | 3 | NC | NC |
| 2161 | 3391 | CTGAGTCCAGTCATTTTGTT | 1 | 2 | NC | NC |
| 2162 | 3402 | CAATGAATGTGCTGAGTCCA | 2 | 2 | NC | NC |
| 2163 | 3429 | AAGCAGCCTGAATGTCCTCA | 2 | 2 | NC | NC |
| 2164 | 3430 | CAAGCAGCCTGAATGTCCTC | 1 | 1 | NC | NC |
| 2165 | 3431 | ACAAGCAGCCTGAATGTCCT | 2 | 2 | NC | NC |
| 2166 | 3432 | TACAAGCAGCCTGAATGTCC | 2 | 1 | NC | NC |
| 2167 | 3433 | GTACAAGCAGCCTGAATGTC | 2 | 2 | NC | NC |
| 2168 | 3434 | AGTACAAGCAGCCTGAATGT | 2 | 2 | NC | NC |
| 2169 | 3435 | TAGTACAAGCAGCCTGAATG | 3 | 2 | NC | NC |
| 2170 | 3436 | TTAGTACAAGCAGCCTGAAT | 2 | 2 | NC | NC |
| 2171 | 3437 | TTTAGTACAAGCAGCCTGAA | 2 | 2 | NC | NC |
| 2172 | 3438 | CTTTAGTACAAGCAGCCTGA | 2 | 3 | NC | NC |
| 2173 | 3439 | TCTTTAGTACAAGCAGCCTG | 2 | 2 | NC | NC |
| 2174 | 3440 | GTCTTTAGTACAAGCAGCCT | 2 | 2 | NC | NC |
| 2175 | 3441 | GGTCTTTAGTACAAGCAGCC | 3 | 2 | NC | NC |
| 2176 | 3442 | AGGTCTTTAGTACAAGCAGC | 3 | 2 | NC | NC |
| 2177 | 3443 | CAGGTCTTTAGTACAAGCAG | 2 | 2 | NC | NC |
| 2178 | 3444 | TCAGGTCTTTAGTACAAGCA | 3 | 2 | NC | NC |
| 2179 | 3445 | GTCAGGTCTTTAGTACAAGC | 2 | 2 | NC | NC |
| 2180 | 3446 | TGTCAGGTCTTTAGTACAAG | 1 | 2 | NC | NC |
| 2181 | 3447 | TTGTCAGGTCTTTAGTACAA | 2 | 2 | NC | NC |
| 2182 | 3448 | GTTGTCAGGTCTTTAGTACA | 1 | 3 | NC | NC |
| 2183 | 3449 | AGTTGTCAGGTCTTTAGTAC | 2 | 3 | NC | NC |
| 2184 | 3450 | CAGTTGTCAGGTCTTTAGTA | 2 | 2 | NC | NC |
| 2185 | 3451 | ACAGTTGTCAGGTCTTTAGT | 2 | 2 | NC | NC |
| 2186 | 3452 | CACAGTTGTCAGGTCTTTAG | 2 | 2 | NC | NC |
| 2187 | 3453 | CCACAGTTGTCAGGTCTTTA | 2 | 3 | NC | NC |
| 2188 | 3454 | GCCACAGTTGTCAGGTCTTT | 2 | 2 | NC | NC |
| 2189 | 3455 | AGCCACAGTTGTCAGGTCTT | 2 | 2 | NC | NC |
| 2190 | 3456 | CAGCCACAGTTGTCAGGTCT | 2 | 2 | NC | NC |
| 2191 | 3457 | ACAGCCACAGTTGTCAGGTC | 2 | 2 | NC | NC |
| 2192 | 3458 | CACAGCCACAGTTGTCAGGT | 2 | 2 | NC | NC |
| 2193 | 3460 | TCCACAGCCACAGTTGTCAG | 2 | 1 | 2 | NC |
| 2194 | 3461 | ATCCACAGCCACAGTTGTCA | 2 | 1 | 1 | NC |
| 2195 | 3462 | CATCCACAGCCACAGTTGTC | 2 | 1 | 2 | NC |
| 2196 | 3463 | ACATCCACAGCCACAGTTGT | 2 | 2 | 1 | NC |
| 2197 | 3464 | AACATCCACAGCCACAGTTG | 1 | NC | NC | NC |
| 2198 | 3465 | CAACATCCACAGCCACAGTT | 2 | NC | NC | NC |
| 2199 | 3466 | ACAACATCCACAGCCACAGT | 2 | NC | NC | NC |
| 2200 | 3467 | TACAACATCCACAGCCACAG | 2 | NC | NC | NC |
| 2201 | 3468 | GTACAACATCCACAGCCACA | 2 | NC | NC | NC |
| 2202 | 3469 | AGTACAACATCCACAGCCAC | 2 | NC | NC | NC |
| 2203 | 3470 | AAGTACAACATCCACAGCCA | 2 | NC | NC | NC |
| 2204 | 3471 | CAAGTACAACATCCACAGCC | 2 | NC | NC | NC |
| 2205 | 3472 | TCAAGTACAACATCCACAGC | 1 | NC | NC | NC |
| 2206 | 3473 | CTCAAGTACAACATCCACAG | 2 | NC | NC | NC |
| 2207 | 3474 | TCTCAAGTACAACATCCACA | 2 | NC | NC | NC |
| 2208 | 3475 | TTCTCAAGTACAACATCCAC | 2 | NC | NC | NC |
| 2209 | 3476 | ATTCTCAAGTACAACATCCA | 2 | NC | NC | NC |
| 2210 | 3477 | CATTCTCAAGTACAACATCC | 2 | NC | NC | NC |
| 2211 | 3478 | CCATTCTCAAGTACAACATC | 2 | NC | NC | NC |
| 2212 | 3479 | CCCATTCTCAAGTACAACAT | 2 | NC | NC | NC |
| 2213 | 3480 | ACCCATTCTCAAGTACAACA | 2 | NC | NC | NC |
| 2214 | 3481 | GACCCATTCTCAAGTACAAC | 2 | NC | NC | NC |
| 2215 | 3482 | AGACCCATTCTCAAGTACAA | 2 | NC | NC | NC |
| 2216 | 3491 | CCTGTACTGAGACCCATTCT | 2 | 2 | NC | NC |
| 2217 | 3492 | ACCTGTACTGAGACCCATTC | 2 | 2 | NC | NC |
| 2218 | 3493 | CACCTGTACTGAGACCCATT | 3 | 2 | NC | NC |
| 2219 | 3494 | ACACCTGTACTGAGACCCAT | 2 | 3 | NC | NC |
| 2220 | 3495 | GACACCTGTACTGAGACCCA | 2 | 2 | NC | NC |
| 2221 | 3496 | TGACACCTGTACTGAGACCC | 2 | 2 | NC | NC |
| 2222 | 3497 | TTGACACCTGTACTGAGACC | 2 | NC | NC | NC |
| 2223 | 3498 | GTTGACACCTGTACTGAGAC | 2 | NC | NC | NC |
| 2224 | 3510 | CGCTTCTAAAAGGTTGACAC | 3 | NC | NC | NC |
| 2225 | 3511 | TCGCTTCTAAAAGGTTGACA | 2 | NC | NC | NC |
| 2226 | 3512 | GTCGCTTCTAAAAGGTTGAC | 3 | NC | NC | NC |
| 2227 | 3513 | GGTCGCTTCTAAAAGGTTGA | 3 | NC | NC | NC |
| 2228 | 3514 | AGGTCGCTTCTAAAAGGTTG | 2 | NC | NC | NC |
| 2229 | 3515 | AAGGTCGCTTCTAAAAGGTT | 2 | NC | NC | NC |
| 2230 | 3516 | CAAGGTCGCTTCTAAAAGGT | 2 | NC | NC | NC |
| 2231 | 3517 | ACAAGGTCGCTTCTAAAAGG | 3 | 3 | NC | NC |
| 2232 | 3518 | AACAAGGTCGCTTCTAAAAG | 2 | 2 | NC | NC |
| 2233 | 3519 | GAACAAGGTCGCTTCTAAAA | 2 | 1 | NC | NC |
| 2234 | 3520 | AGAACAAGGTCGCTTCTAAA | 2 | 2 | NC | NC |
| 2235 | 3521 | AAGAACAAGGTCGCTTCTAA | 2 | 2 | NC | NC |
| 2236 | 3522 | GAAGAACAAGGTCGCTTCTA | 2 | 3 | NC | NC |
| 2237 | 3523 | GGAAGAACAAGGTCGCTTCT | 2 | 2 | NC | NC |
| 2238 | 3524 | AGGAAGAACAAGGTCGCTTC | 2 | 2 | NC | NC |
| 2239 | 3525 | AAGGAAGAACAAGGTCGCTT | 2 | 2 | NC | NC |
| 2240 | 3526 | AAAGGAAGAACAAGGTCGCT | 2 | 2 | NC | NC |
| 2241 | 3527 | GAAAGGAAGAACAAGGTCGC | 2 | 2 | NC | NC |
| 2242 | 3528 | GGAAAGGAAGAACAAGGTCG | 2 | 2 | NC | NC |
| 2243 | 3529 | AGGAAAGGAAGAACAAGGTC | 2 | 2 | NC | NC |
| 2244 | 3530 | AAGGAAAGGAAGAACAAGGT | 1 | 2 | NC | NC |
| 2245 | 3531 | GAAGGAAAGGAAGAACAAGG | 1 | 1 | NC | NC |
| 2246 | 3532 | GGAAGGAAAGGAAGAACAAG | 1 | 1 | NC | NC |
| 2247 | 3533 | CGGAAGGAAAGGAAGAACAA | 2 | 1 | NC | NC |
| 2248 | 3534 | TCGGAAGGAAAGGAAGAACA | 2 | 2 | NC | NC |
| 2249 | 3535 | CTCGGAAGGAAAGGAAGAAC | 2 | 1 | NC | NC |
| 2250 | 3536 | TCTCGGAAGGAAAGGAAGAA | 2 | 1 | NC | NC |
| 2251 | 3537 | CTCTCGGAAGGAAAGGAAGA | 2 | 2 | NC | NC |
| 2252 | 3538 | GCTCTCGGAAGGAAAGGAAG | 2 | 2 | NC | NC |
| 2253 | 3539 | AGCTCTCGGAAGGAAAGGAA | 1 | 2 | NC | NC |
| 2254 | 3540 | GAGCTCTCGGAAGGAAAGGA | 1 | 2 | NC | NC |
| 2255 | 3564 | GTCTCATCACAGTCCTCTCT | 2 | 2 | NC | NC |
| 2256 | 3565 | TGTCTCATCACAGTCCTCTC | 2 | 2 | NC | NC |
| 2257 | 3573 | TGTTATCCTGTCTCATCACA | 2 | 2 | NC | NC |
| 2258 | 3574 | CTGTTATCCTGTCTCATCAC | 1 | 2 | NC | NC |
| 2259 | 3575 | TCTGTTATCCTGTCTCATCA | 1 | 2 | NC | NC |
| 2260 | 3576 | CTCTGTTATCCTGTCTCATC | 2 | 2 | NC | NC |
| 2261 | 3577 | TCTCTGTTATCCTGTCTCAT | 2 | 2 | NC | NC |
| 2262 | 3578 | ATCTCTGTTATCCTGTCTCA | 1 | 2 | NC | NC |
| 2263 | 3579 | TATCTCTGTTATCCTGTCTC | 1 | 1 | NC | NC |
| 2264 | 3580 | GTATCTCTGTTATCCTGTCT | 1 | 1 | NC | NC |
| 2265 | 3581 | AGTATCTCTGTTATCCTGTC | 2 | 2 | NC | NC |
| 2266 | 3592 | GTATCATCCACAGTATCTCT | 2 | 2 | NC | NC |
| 2267 | 3593 | AGTATCATCCACAGTATCTC | 2 | NC | NC | NC |
| 2268 | 3594 | CAGTATCATCCACAGTATCT | 1 | NC | NC | NC |
| 2269 | 3595 | ACAGTATCATCCACAGTATC | 1 | NC | NC | NC |
| 2270 | 3596 | AACAGTATCATCCACAGTAT | 2 | NC | NC | NC |
| 2271 | 3597 | TAACAGTATCATCCACAGTA | 2 | NC | NC | NC |
| 2272 | 3598 | CTAACAGTATCATCCACAGT | 2 | NC | NC | NC |
| 2273 | 3599 | ACTAACAGTATCATCCACAG | 2 | NC | NC | NC |
| 2274 | 3600 | TACTAACAGTATCATCCACA | 2 | NC | NC | NC |
| 2275 | 3601 | CTACTAACAGTATCATCCAC | 2 | NC | NC | NC |
| 2276 | 3602 | GCTACTAACAGTATCATCCA | 2 | NC | NC | NC |
| 2277 | 3603 | CGCTACTAACAGTATCATCC | 3 | NC | NC | NC |
| 2278 | 3604 | TCGCTACTAACAGTATCATC | 2 | NC | NC | NC |
| 2279 | 3605 | TTCGCTACTAACAGTATCAT | 2 | NC | NC | NC |
| 2280 | 3606 | ATTCGCTACTAACAGTATCA | 3 | NC | NC | NC |
| 2281 | 3607 | GATTCGCTACTAACAGTATC | 3 | NC | NC | NC |
| 2282 | 3608 | CGATTCGCTACTAACAGTAT | 3 | NC | NC | NC |
| 2283 | 3621 | ACAAAGACTGAAGCGATTCG | 3 | NC | NC | NC |
| 2284 | 3622 | AACAAAGACTGAAGCGATTC | 2 | NC | NC | NC |
| 2285 | 3623 | GAACAAAGACTGAAGCGATT | 3 | NC | NC | NC |
| 2286 | 3624 | AGAACAAAGACTGAAGCGAT | 2 | NC | NC | NC |
| 2287 | 3625 | GAGAACAAAGACTGAAGCGA | 2 | NC | NC | NC |
| 2288 | 3626 | TGAGAACAAAGACTGAAGCG | 1 | NC | NC | NC |
| 2289 | 3627 | CTGAGAACAAAGACTGAAGC | 0 | 0 | NC | NC |
| 2290 | 3628 | TCTGAGAACAAAGACTGAAG | 1 | 1 | NC | NC |
| 2291 | 3629 | TTCTGAGAACAAAGACTGAA | 1 | 1 | NC | NC |
| 2292 | 3630 | ATTCTGAGAACAAAGACTGA | 2 | 2 | NC | NC |
| 2293 | 3631 | CATTCTGAGAACAAAGACTG | 2 | 2 | NC | NC |
| 2294 | 3632 | CCATTCTGAGAACAAAGACT | 2 | 2 | NC | NC |
| 2295 | 3633 | CCCATTCTGAGAACAAAGAC | 1 | 1 | NC | NC |
| 2296 | 3634 | TCCCATTCTGAGAACAAAGA | 1 | 1 | NC | NC |
| 2297 | 3635 | GTCCCATTCTGAGAACAAAG | 2 | 1 | NC | NC |
| 2298 | 3636 | TGTCCCATTCTGAGAACAAA | 2 | 1 | NC | NC |
| 2299 | 3637 | TTGTCCCATTCTGAGAACAA | 2 | 1 | NC | NC |
| 2300 | 3638 | ATTGTCCCATTCTGAGAACA | 2 | 2 | NC | NC |
| 2301 | 3639 | GATTGTCCCATTCTGAGAAC | 3 | 2 | NC | NC |
| 2302 | 3640 | GGATTGTCCCATTCTGAGAA | 2 | 2 | NC | NC |
| 2303 | 3641 | TGGATTGTCCCATTCTGAGA | 2 | 2 | NC | NC |
| 2304 | 3642 | CTGGATTGTCCCATTCTGAG | 2 | 2 | NC | NC |
| 2305 | 3643 | ACTGGATTGTCCCATTCTGA | 2 | 2 | NC | NC |
| 2306 | 3644 | TACTGGATTGTCCCATTCTG | 2 | 2 | NC | NC |
| 2307 | 3645 | ATACTGGATTGTCCCATTCT | 2 | 2 | NC | NC |
| 2308 | 3646 | AATACTGGATTGTCCCATTC | 2 | 2 | NC | NC |
| 2309 | 3647 | AAATACTGGATTGTCCCATT | 1 | 2 | NC | NC |
| 2310 | 3648 | CAAATACTGGATTGTCCCAT | 2 | 2 | NC | NC |
| 2311 | 3649 | GCAAATACTGGATTGTCCCA | 2 | 2 | NC | NC |
| 2312 | 3650 | GGCAAATACTGGATTGTCCC | 2 | 2 | NC | NC |
| 2313 | 3652 | CGGGCAAATACTGGATTGTC | 3 | 3 | NC | NC |
| 2314 | 3653 | ACGGGCAAATACTGGATTGT | 2 | 2 | NC | NC |
| 2315 | 3654 | AACGGGCAAATACTGGATTG | 2 | 2 | NC | NC |
| 2316 | 3655 | TAACGGGCAAATACTGGATT | 3 | 2 | NC | NC |
| 2317 | 3656 | ATAACGGGCAAATACTGGAT | 2 | 2 | NC | NC |
| 2318 | 3657 | GATAACGGGCAAATACTGGA | 2 | 3 | NC | NC |
| 2319 | 3658 | GGATAACGGGCAAATACTGG | 3 | 3 | NC | NC |
| 2320 | 3659 | TGGATAACGGGCAAATACTG | 2 | 2 | NC | NC |
| 2321 | 3660 | CTGGATAACGGGCAAATACT | 3 | 2 | NC | NC |
| 2322 | 3661 | TCTGGATAACGGGCAAATAC | 2 | 3 | NC | NC |
| 2323 | 3662 | CTCTGGATAACGGGCAAATA | 3 | 2 | NC | NC |
| 2324 | 3663 | CCTCTGGATAACGGGCAAAT | 2 | 3 | NC | NC |
| 2325 | 3664 | ACCTCTGGATAACGGGCAAA | 3 | 2 | NC | NC |
| 2326 | 3665 | AACCTCTGGATAACGGGCAA | 2 | 3 | NC | NC |
| 2327 | 3666 | CAACCTCTGGATAACGGGCA | 2 | 2 | NC | NC |
| 2328 | 3668 | AGCAACCTCTGGATAACGGG | 2 | 2 | NC | NC |
| 2329 | 3669 | CAGCAACCTCTGGATAACGG | 2 | 2 | NC | NC |
| 2330 | 3678 | TTACATCAACAGCAACCTCT | 2 | 2 | NC | NC |
| 2331 | 3679 | CTTACATCAACAGCAACCTC | 2 | 2 | NC | NC |
| 2332 | 3680 | GCTTACATCAACAGCAACCT | 2 | 2 | NC | NC |
| 2333 | 3685 | CCACTGCTTACATCAACAGC | 2 | 2 | NC | NC |
| 2334 | 3686 | GCCACTGCTTACATCAACAG | 2 | 2 | NC | NC |
| 2335 | 3710 | TTTAACTGCTAAGCTCTCAG | 2 | 2 | NC | NC |
| 2336 | 3711 | TTTTAACTGCTAAGCTCTCA | 2 | 2 | NC | NC |
| 2337 | 3712 | ATTTTAACTGCTAAGCTCTC | 2 | 2 | NC | NC |
| 2338 | 3713 | AATTTTAACTGCTAAGCTCT | 2 | 2 | NC | NC |
| 2339 | 3714 | GAATTTTAACTGCTAAGCTC | 2 | 2 | NC | NC |
| 2340 | 3715 | TGAATTTTAACTGCTAAGCT | 2 | 2 | NC | NC |
| 2341 | 3716 | GTGAATTTTAACTGCTAAGC | 1 | 1 | NC | NC |
| 2342 | 3717 | TGTGAATTTTAACTGCTAAG | 2 | 1 | NC | NC |
| 2343 | 3718 | TTGTGAATTTTAACTGCTAA | 2 | 1 | NC | NC |
| 2344 | 3719 | GTTGTGAATTTTAACTGCTA | 2 | 2 | NC | NC |
| 2345 | 3720 | TGTTGTGAATTTTAACTGCT | 2 | 1 | NC | NC |
| 2346 | 3721 | ATGTTGTGAATTTTAACTGC | 2 | 2 | NC | NC |
| 2347 | 3722 | GATGTTGTGAATTTTAACTG | 2 | 2 | NC | NC |
| 2348 | 3723 | AGATGTTGTGAATTTTAACT | 2 | 1 | NC | NC |
| 2349 | 3724 | AAGATGTTGTGAATTTTAAC | 2 | 1 | NC | NC |
| 2350 | 3725 | CAAGATGTTGTGAATTTTAA | 1 | 1 | NC | NC |
| 2351 | 3743 | GGTGAAACGATAGGGATACA | 2 | 3 | NC | NC |
| 2352 | 3744 | TGGTGAAACGATAGGGATAC | 3 | 3 | NC | NC |
| 2353 | 3745 | TTGGTGAAACGATAGGGATA | 3 | 2 | NC | NC |
| 2354 | 3746 | TTTGGTGAAACGATAGGGAT | 3 | 2 | NC | NC |
| 2355 | 3747 | CTTTGGTGAAACGATAGGGA | 3 | 2 | NC | NC |
| 2356 | 3748 | CCTTTGGTGAAACGATAGGG | 2 | NC | NC | NC |
| 2357 | 3750 | TTCCTTTGGTGAAACGATAG | 1 | NC | NC | NC |
| 2358 | 3751 | ATTCCTTTGGTGAAACGATA | 2 | NC | NC | NC |
| 2359 | 3752 | CATTCCTTTGGTGAAACGAT | 2 | NC | NC | NC |
| 2360 | 3753 | TCATTCCTTTGGTGAAACGA | 2 | NC | NC | NC |
| 2361 | 3754 | ATCATTCCTTTGGTGAAACG | 3 | NC | NC | NC |
| 2362 | 3755 | AATCATTCCTTTGGTGAAAC | 2 | NC | NC | NC |
| 2363 | 3756 | GAATCATTCCTTTGGTGAAA | 2 | NC | NC | NC |
| 2364 | 3757 | TGAATCATTCCTTTGGTGAA | 2 | NC | NC | NC |
| 2365 | 3758 | ATGAATCATTCCTTTGGTGA | 2 | NC | NC | NC |
| 2366 | 3759 | AATGAATCATTCCTTTGGTG | 2 | NC | NC | NC |
| 2367 | 3768 | CCTGCATTGAATGAATCATT | 1 | 2 | NC | NC |
| 2368 | 3769 | ACCTGCATTGAATGAATCAT | 2 | 2 | NC | NC |
| 2369 | 3770 | AACCTGCATTGAATGAATCA | 1 | 2 | NC | NC |
| 2370 | 3771 | GAACCTGCATTGAATGAATC | 2 | 2 | NC | NC |
| 2371 | 3772 | AGAACCTGCATTGAATGAAT | 2 | 2 | NC | NC |
| 2372 | 3773 | GAGAACCTGCATTGAATGAA | 2 | 2 | NC | NC |
| 2373 | 3774 | GGAGAACCTGCATTGAATGA | 2 | 2 | NC | NC |
| 2374 | 3786 | TATCTACTTGCTGGAGAACC | 2 | NC | NC | NC |
| 2375 | 3787 | TTATCTACTTGCTGGAGAAC | 2 | NC | NC | NC |
| 2376 | 3788 | GTTATCTACTTGCTGGAGAA | 2 | NC | NC | NC |
| 2377 | 3789 | TGTTATCTACTTGCTGGAGA | 2 | NC | NC | NC |
| 2378 | 3790 | TTGTTATCTACTTGCTGGAG | 2 | NC | NC | NC |
| 2379 | 3791 | CTTGTTATCTACTTGCTGGA | 2 | NC | NC | NC |
| 2380 | 3792 | ACTTGTTATCTACTTGCTGG | 2 | NC | NC | NC |
| 2381 | 3793 | AACTTGTTATCTACTTGCTG | 2 | NC | NC | NC |
| 2382 | 3794 | AAACTTGTTATCTACTTGCT | 2 | NC | NC | NC |
| 2383 | 3795 | TAAACTTGTTATCTACTTGC | 2 | NC | NC | NC |
| 2384 | 3796 | ATAAACTTGTTATCTACTTG | 2 | NC | NC | NC |
| 2385 | 3798 | CAATAAACTTGTTATCTACT | 2 | NC | NC | NC |
| 2386 | 3799 | GCAATAAACTTGTTATCTAC | 2 | NC | NC | NC |
| 2387 | 3800 | GGCAATAAACTTGTTATCTA | 2 | NC | NC | NC |
| 2388 | 3801 | AGGCAATAAACTTGTTATCT | 2 | NC | NC | NC |
| 2389 | 3802 | CAGGCAATAAACTTGTTATC | 1 | NC | NC | NC |
| 2390 | 3803 | ACAGGCAATAAACTTGTTAT | 2 | NC | NC | NC |
| 2391 | 3804 | AACAGGCAATAAACTTGTTA | 2 | NC | NC | NC |
| 2392 | 3805 | AAACAGGCAATAAACTTGTT | 2 | NC | NC | NC |
| 2393 | 3806 | CAAACAGGCAATAAACTTGT | 1 | NC | NC | NC |
| 2394 | 3807 | TCAAACAGGCAATAAACTTG | 2 | 2 | NC | NC |
| 2395 | 3808 | ATCAAACAGGCAATAAACTT | 2 | 2 | NC | NC |
| 2396 | 3809 | CATCAAACAGGCAATAAACT | 1 | 1 | NC | NC |
| 2397 | 3810 | TCATCAAACAGGCAATAAAC | 2 | 2 | NC | NC |
| 2398 | 3811 | CTCATCAAACAGGCAATAAA | 2 | 2 | NC | NC |
| 2399 | 3812 | GCTCATCAAACAGGCAATAA | 2 | 2 | NC | NC |
| 2400 | 3813 | TGCTCATCAAACAGGCAATA | 2 | 2 | NC | NC |
| 2401 | 3814 | GTGCTCATCAAACAGGCAAT | 2 | 2 | NC | NC |
| 2402 | 3815 | AGTGCTCATCAAACAGGCAA | 2 | 2 | NC | NC |
| 2403 | 3816 | TAGTGCTCATCAAACAGGCA | 2 | 3 | NC | NC |
| 2404 | 3817 | TTAGTGCTCATCAAACAGGC | 2 | 3 | NC | NC |
| 2405 | 3818 | CTTAGTGCTCATCAAACAGG | 2 | 2 | NC | NC |
| 2406 | 3819 | TCTTAGTGCTCATCAAACAG | 2 | 2 | NC | NC |
| 2407 | 3820 | GTCTTAGTGCTCATCAAACA | 2 | 2 | NC | NC |
| 2408 | 3821 | AGTCTTAGTGCTCATCAAAC | 2 | 2 | NC | NC |
| 2409 | 3822 | CAGTCTTAGTGCTCATCAAA | 2 | 2 | NC | NC |
| 2410 | 3823 | TCAGTCTTAGTGCTCATCAA | 2 | 2 | NC | NC |
| 2411 | 3824 | TTCAGTCTTAGTGCTCATCA | 2 | 2 | NC | NC |
| 2412 | 3825 | CTTCAGTCTTAGTGCTCATC | 2 | 2 | NC | NC |
| 2413 | 3826 | TCTTCAGTCTTAGTGCTCAT | 2 | 2 | NC | NC |
| 2414 | 3827 | CTCTTCAGTCTTAGTGCTCA | 2 | 2 | NC | NC |
| 2415 | 3828 | TCTCTTCAGTCTTAGTGCTC | 2 | 2 | NC | NC |
| 2416 | 3829 | TTCTCTTCAGTCTTAGTGCT | 2 | 2 | NC | NC |
| 2417 | 3830 | ATTCTCTTCAGTCTTAGTGC | 2 | 2 | NC | NC |
| 2418 | 3831 | CATTCTCTTCAGTCTTAGTG | 2 | 2 | NC | NC |
| 2419 | 3832 | CCATTCTCTTCAGTCTTAGT | 2 | 2 | NC | NC |
| 2420 | 3833 | GCCATTCTCTTCAGTCTTAG | 2 | 2 | NC | NC |
| 2421 | 3834 | CGCCATTCTCTTCAGTCTTA | 2 | 2 | NC | NC |
| 2422 | 3835 | TCGCCATTCTCTTCAGTCTT | 2 | 2 | NC | NC |
| 2423 | 3836 | CTCGCCATTCTCTTCAGTCT | 2 | 2 | NC | NC |
| 2424 | 3837 | CCTCGCCATTCTCTTCAGTC | 2 | 2 | NC | NC |
| 2425 | 3838 | GCCTCGCCATTCTCTTCAGT | 2 | 2 | NC | NC |
| 2426 | 3839 | TGCCTCGCCATTCTCTTCAG | 2 | 2 | NC | NC |
| 2427 | 3840 | CTGCCTCGCCATTCTCTTCA | 2 | 1 | NC | NC |
| 2428 | 3842 | ACCTGCCTCGCCATTCTCTT | 1 | 2 | NC | NC |
| 2429 | 3904 | AGCTGCTCCAGACGTATACG | 3 | NC | NC | NC |
| 2430 | 3905 | AAGCTGCTCCAGACGTATAC | 3 | NC | NC | NC |
| 2431 | 3906 | TAAGCTGCTCCAGACGTATA | 3 | NC | NC | NC |
| 2432 | 3907 | ATAAGCTGCTCCAGACGTAT | 3 | NC | NC | NC |
| 2433 | 3908 | GATAAGCTGCTCCAGACGTA | 3 | NC | NC | NC |
| 2434 | 3909 | TGATAAGCTGCTCCAGACGT | 2 | NC | NC | NC |
| 2435 | 3910 | ATGATAAGCTGCTCCAGACG | 2 | 3 | NC | NC |
| 2436 | 3911 | AATGATAAGCTGCTCCAGAC | 2 | 2 | NC | NC |
| 2437 | 3912 | CAATGATAAGCTGCTCCAGA | 2 | 2 | NC | NC |
| 2438 | 3913 | TCAATGATAAGCTGCTCCAG | 1 | 2 | NC | NC |
| 2439 | 3914 | ATCAATGATAAGCTGCTCCA | 1 | 2 | NC | NC |
| 2440 | 3915 | AATCAATGATAAGCTGCTCC | 2 | 2 | NC | NC |
| 2441 | 3916 | GAATCAATGATAAGCTGCTC | 2 | 3 | NC | NC |
| 2442 | 3917 | GGAATCAATGATAAGCTGCT | 2 | 2 | NC | NC |
| 2443 | 3918 | AGGAATCAATGATAAGCTGC | 2 | 2 | NC | NC |
| 2444 | 3919 | TAGGAATCAATGATAAGCTG | 2 | 2 | NC | NC |
| 2445 | 3920 | GTAGGAATCAATGATAAGCT | 3 | NC | NC | NC |
| 2446 | 3921 | CGTAGGAATCAATGATAAGC | 3 | NC | NC | NC |
| 2447 | 3922 | TCGTAGGAATCAATGATAAG | 2 | NC | NC | NC |
| 2448 | 3923 | CTCGTAGGAATCAATGATAA | 2 | NC | NC | NC |
| 2449 | 3924 | TCTCGTAGGAATCAATGATA | 2 | NC | NC | NC |
| 2450 | 3925 | TTCTCGTAGGAATCAATGAT | 2 | NC | NC | NC |
| 2451 | 3926 | CTTCTCGTAGGAATCAATGA | 2 | NC | NC | NC |
| 2452 | 3927 | GCTTCTCGTAGGAATCAATG | 2 | NC | NC | NC |
| 2453 | 3928 | TGCTTCTCGTAGGAATCAAT | 2 | NC | NC | NC |
| 2454 | 3929 | TTGCTTCTCGTAGGAATCAA | 2 | NC | NC | NC |
| 2455 | 3930 | GTTGCTTCTCGTAGGAATCA | 2 | NC | NC | NC |
| 2456 | 3931 | TGTTGCTTCTCGTAGGAATC | 2 | NC | NC | NC |
| 2457 | 3932 | CTGTTGCTTCTCGTAGGAAT | 2 | NC | NC | NC |
| 2458 | 3933 | CCTGTTGCTTCTCGTAGGAA | 2 | NC | NC | NC |
| 2459 | 3934 | GCCTGTTGCTTCTCGTAGGA | 3 | NC | NC | NC |
| 2460 | 3953 | TTTCCGACCAGAGCCTTGTG | 2 | 3 | NC | NC |
| 2461 | 3954 | TTTTCCGACCAGAGCCTTGT | 2 | 3 | NC | NC |
| 2462 | 3955 | TTTTTCCGACCAGAGCCTTG | 2 | 2 | NC | NC |
| 2463 | 3971 | AGTAGAAGACAGTAATTTTT | 1 | 2 | NC | NC |
| 2464 | 3972 | GAGTAGAAGACAGTAATTTT | 2 | 2 | NC | NC |
| 2465 | 3973 | AGAGTAGAAGACAGTAATTT | 1 | 1 | NC | NC |
| 2466 | 3974 | TAGAGTAGAAGACAGTAATT | 2 | 2 | NC | NC |
| 2467 | 3975 | TTAGAGTAGAAGACAGTAAT | 2 | 2 | NC | NC |
| 2468 | 3976 | ATTAGAGTAGAAGACAGTAA | 2 | 2 | NC | NC |
| 2469 | 3977 | AATTAGAGTAGAAGACAGTA | 1 | 2 | NC | NC |
| 2470 | 3978 | GAATTAGAGTAGAAGACAGT | 2 | 2 | NC | NC |
| 2471 | 3979 | GGAATTAGAGTAGAAGACAG | 1 | 1 | NC | NC |
| 2472 | 3980 | AGGAATTAGAGTAGAAGACA | 1 | 1 | NC | NC |
| 2473 | 3981 | GAGGAATTAGAGTAGAAGAC | 2 | 2 | NC | NC |
| 2474 | 3982 | GGAGGAATTAGAGTAGAAGA | 1 | 2 | NC | NC |
| 2475 | 3983 | CGGAGGAATTAGAGTAGAAG | 2 | NC | NC | NC |
| 2476 | 3984 | GCGGAGGAATTAGAGTAGAA | 2 | NC | NC | NC |
| 2477 | 3985 | AGCGGAGGAATTAGAGTAGA | 2 | NC | NC | NC |
| 2478 | 3986 | TAGCGGAGGAATTAGAGTAG | 3 | NC | NC | NC |
| 2479 | 3987 | CTAGCGGAGGAATTAGAGTA | 2 | NC | NC | NC |
| 2480 | 3988 | TCTAGCGGAGGAATTAGAGT | 3 | NC | NC | NC |
| 2481 | 3999 | TCACTGTTATCTCTAGCGGA | 3 | NC | NC | NC |
| 2482 | 4000 | GTCACTGTTATCTCTAGCGG | 3 | NC | NC | NC |
| 2483 | 4001 | TGTCACTGTTATCTCTAGCG | 3 | NC | NC | NC |
| 2484 | 4002 | CTGTCACTGTTATCTCTAGC | 2 | NC | NC | NC |
| 2485 | 4003 | TCTGTCACTGTTATCTCTAG | 1 | 2 | NC | NC |
| 2486 | 4004 | CTCTGTCACTGTTATCTCTA | 1 | 1 | NC | NC |
| 2487 | 4005 | CCTCTGTCACTGTTATCTCT | 1 | 2 | NC | NC |
| 2488 | 4006 | TCCTCTGTCACTGTTATCTC | 1 | 1 | NC | NC |
| 2489 | 4007 | TTCCTCTGTCACTGTTATCT | 2 | 2 | NC | NC |
| 2490 | 4008 | GTTCCTCTGTCACTGTTATC | 2 | 2 | NC | NC |
| 2491 | 4009 | TGTTCCTCTGTCACTGTTAT | 2 | 2 | NC | NC |
| 2492 | 4010 | TTGTTCCTCTGTCACTGTTA | 2 | 2 | NC | NC |
| 2493 | 4011 | TTTGTTCCTCTGTCACTGTT | 1 | 1 | NC | NC |
| 2494 | 4012 | CTTTGTTCCTCTGTCACTGT | 1 | 1 | NC | NC |
| 2495 | 4013 | CCTTTGTTCCTCTGTCACTG | 2 | 2 | NC | NC |
| 2496 | 4014 | TCCTTTGTTCCTCTGTCACT | 1 | 1 | NC | NC |
| 2497 | 4015 | CTCCTTTGTTCCTCTGTCAC | 2 | 2 | NC | NC |
| 2498 | 4016 | TCTCCTTTGTTCCTCTGTCA | 2 | 2 | NC | NC |
| 2499 | 4017 | GTCTCCTTTGTTCCTCTGTC | 2 | 1 | NC | NC |
| 2500 | 4018 | AGTCTCCTTTGTTCCTCTGT | 2 | 2 | NC | NC |
| 2501 | 4019 | GAGTCTCCTTTGTTCCTCTG | 1 | NC | NC | NC |
| 2502 | 4020 | AGAGTCTCCTTTGTTCCTCT | 2 | NC | NC | NC |
| 2503 | 4021 | AAGAGTCTCCTTTGTTCCTC | 1 | NC | NC | NC |
| 2504 | 4022 | TAAGAGTCTCCTTTGTTCCT | 2 | NC | NC | NC |
| 2505 | 4023 | ATAAGAGTCTCCTTTGTTCC | 1 | NC | NC | NC |
| 2506 | 4024 | CATAAGAGTCTCCTTTGTTC | 1 | NC | NC | NC |
| 2507 | 4025 | CCATAAGAGTCTCCTTTGTT | 1 | NC | NC | NC |
| 2508 | 4026 | ACCATAAGAGTCTCCTTTGT | 2 | NC | NC | NC |
| 2509 | 4027 | CACCATAAGAGTCTCCTTTG | 2 | NC | NC | NC |
| 2510 | 4028 | ACACCATAAGAGTCTCCTTT | 2 | NC | NC | NC |
| 2511 | 4029 | AACACCATAAGAGTCTCCTT | 2 | NC | NC | NC |
| 2512 | 4030 | TAACACCATAAGAGTCTCCT | 3 | NC | NC | NC |
| 2513 | 4031 | GTAACACCATAAGAGTCTCC | 3 | NC | NC | NC |
| 2514 | 4032 | GGTAACACCATAAGAGTCTC | 3 | NC | NC | NC |
| 2515 | 4046 | TTCCAGATTTTTGTGGTAAC | 2 | 2 | NC | NC |
| 2516 | 4047 | CTTCCAGATTTTTGTGGTAA | 2 | 2 | NC | NC |
| 2517 | 4048 | TCTTCCAGATTTTTGTGGTA | 1 | 2 | NC | NC |
| 2518 | 4049 | ATCTTCCAGATTTTTGTGGT | 2 | 1 | NC | NC |
| 2519 | 4050 | GATCTTCCAGATTTTTGTGG | 2 | 2 | NC | NC |
| 2520 | 4051 | AGATCTTCCAGATTTTTGTG | 2 | 1 | NC | NC |
| 2521 | 4052 | CAGATCTTCCAGATTTTTGT | 2 | 1 | NC | NC |
| 2522 | 4053 | CCAGATCTTCCAGATTTTTG | 2 | 1 | NC | NC |
| 2523 | 4054 | CCCAGATCTTCCAGATTTTT | 1 | 1 | NC | NC |
| 2524 | 4055 | GCCCAGATCTTCCAGATTTT | 2 | 2 | NC | NC |
| 2525 | 4056 | GGCCCAGATCTTCCAGATTT | 2 | 3 | NC | NC |
| 2526 | 4057 | AGGCCCAGATCTTCCAGATT | 2 | 2 | NC | NC |
| 2527 | 4058 | AAGGCCCAGATCTTCCAGAT | 2 | 1 | NC | NC |
| 2528 | 4059 | CAAGGCCCAGATCTTCCAGA | 2 | 2 | NC | NC |
| 2529 | 4060 | TCAAGGCCCAGATCTTCCAG | 2 | 2 | NC | NC |
| 2530 | 4061 | TTCAAGGCCCAGATCTTCCA | 2 | 2 | NC | NC |
| 2531 | 4062 | ATTCAAGGCCCAGATCTTCC | 2 | NC | NC | NC |
| 2532 | 4063 | AATTCAAGGCCCAGATCTTC | 2 | NC | NC | NC |
| 2533 | 4064 | AAATTCAAGGCCCAGATCTT | 1 | NC | NC | NC |
| 2534 | 4065 | CAAATTCAAGGCCCAGATCT | 1 | NC | NC | NC |
| 2535 | 4066 | ACAAATTCAAGGCCCAGATC | 0 | NC | NC | NC |
| 2536 | 4067 | TACAAATTCAAGGCCCAGAT | 1 | NC | NC | NC |
| 2537 | 4068 | ATACAAATTCAAGGCCCAGA | 2 | NC | NC | NC |
| 2538 | 4069 | AATACAAATTCAAGGCCCAG | 2 | NC | NC | NC |
| 2539 | 4070 | AAATACAAATTCAAGGCCCA | 2 | NC | NC | NC |
| 2540 | 4071 | GAAATACAAATTCAAGGCCC | 1 | NC | NC | NC |
| 2541 | 4072 | GGAAATACAAATTCAAGGCC | 2 | NC | NC | NC |
| 2542 | 4073 | TGGAAATACAAATTCAAGGC | 1 | NC | NC | NC |
| 2543 | 4074 | CTGGAAATACAAATTCAAGG | 1 | NC | NC | NC |
| 2544 | 4075 | TCTGGAAATACAAATTCAAG | 1 | NC | NC | NC |
| 2545 | 4076 | GTCTGGAAATACAAATTCAA | 1 | NC | NC | NC |
| 2546 | 4077 | TGTCTGGAAATACAAATTCA | 1 | NC | NC | NC |
| 2547 | 4078 | GTGTCTGGAAATACAAATTC | 2 | NC | NC | NC |
| 2548 | 4079 | AGTGTCTGGAAATACAAATT | 2 | NC | NC | NC |
| 2549 | 4080 | TAGTGTCTGGAAATACAAAT | 2 | NC | NC | NC |
| 2550 | 4081 | CTAGTGTCTGGAAATACAAA | 2 | NC | NC | NC |
| 2551 | 4082 | ACTAGTGTCTGGAAATACAA | 2 | 2 | NC | NC |
| 2552 | 4083 | CACTAGTGTCTGGAAATACA | 2 | 2 | NC | NC |
| 2553 | 4084 | TCACTAGTGTCTGGAAATAC | 2 | 2 | NC | NC |
| 2554 | 4085 | ATCACTAGTGTCTGGAAATA | 2 | 2 | NC | NC |
| 2555 | 4086 | AATCACTAGTGTCTGGAAAT | 1 | 2 | NC | NC |
| 2556 | 4087 | GAATCACTAGTGTCTGGAAA | 2 | 2 | NC | NC |
| 2557 | 4088 | AGAATCACTAGTGTCTGGAA | 2 | 2 | NC | NC |
| 2558 | 4089 | GAGAATCACTAGTGTCTGGA | 2 | 2 | NC | NC |
| 2559 | 4090 | AGAGAATCACTAGTGTCTGG | 2 | 2 | NC | NC |
| 2560 | 4091 | CAGAGAATCACTAGTGTCTG | 2 | 2 | NC | NC |
| 2561 | 4092 | CCAGAGAATCACTAGTGTCT | 2 | 2 | NC | NC |
| 2562 | 4093 | ACCAGAGAATCACTAGTGTC | 2 | 2 | NC | NC |
| 2563 | 4094 | GACCAGAGAATCACTAGTGT | 2 | NC | NC | NC |
| 2564 | 4095 | GGACCAGAGAATCACTAGTG | 2 | NC | NC | NC |
| 2565 | 4096 | AGGACCAGAGAATCACTAGT | 2 | NC | NC | NC |
| 2566 | 4097 | AAGGACCAGAGAATCACTAG | 2 | NC | NC | NC |
| 2567 | 4098 | CAAGGACCAGAGAATCACTA | 2 | NC | NC | NC |
| 2568 | 4099 | ACAAGGACCAGAGAATCACT | 2 | NC | NC | NC |
| 2569 | 4100 | CACAAGGACCAGAGAATCAC | 2 | NC | NC | NC |
| 2570 | 4101 | CCACAAGGACCAGAGAATCA | 2 | NC | NC | NC |
| 2571 | 4102 | CCCACAAGGACCAGAGAATC | 2 | NC | NC | NC |
| 2572 | 4118 | ACATAGTGGTACTTTTCCCA | 2 | NC | NC | NC |
| 2573 | 4119 | AACATAGTGGTACTTTTCCC | 2 | NC | NC | NC |
| 2574 | 4120 | AAACATAGTGGTACTTTTCC | 1 | NC | NC | NC |
| 2575 | 4121 | AAAACATAGTGGTACTTTTC | 2 | NC | NC | NC |
| 2576 | 4122 | CAAAACATAGTGGTACTTTT | 2 | NC | NC | NC |
| 2577 | 4123 | ACAAAACATAGTGGTACTTT | 2 | NC | NC | NC |
| 2578 | 4124 | CACAAAACATAGTGGTACTT | 2 | NC | NC | NC |
| 2579 | 4130 | TCTTTCCACAAAACATAGTG | 1 | NC | NC | NC |
| 2580 | 4131 | CTCTTTCCACAAAACATAGT | 1 | NC | NC | NC |
| 2581 | 4132 | TCTCTTTCCACAAAACATAG | 1 | NC | NC | NC |
| 2582 | 4133 | TTCTCTTTCCACAAAACATA | 1 | NC | NC | NC |
| 2583 | 4134 | CTTCTCTTTCCACAAAACAT | 1 | NC | NC | NC |
| 2584 | 4135 | GCTTCTCTTTCCACAAAACA | 2 | 2 | NC | NC |
| 2585 | 4136 | GGCTTCTCTTTCCACAAAAC | 2 | 2 | NC | NC |
| 2586 | 4137 | TGGCTTCTCTTTCCACAAAA | 1 | 1 | NC | NC |
| 2587 | 4138 | TTGGCTTCTCTTTCCACAAA | 1 | 1 | NC | NC |
| 2588 | 4139 | ATTGGCTTCTCTTTCCACAA | 1 | 1 | NC | NC |
| 2589 | 4140 | CATTGGCTTCTCTTTCCACA | 1 | 1 | NC | NC |
| 2590 | 4141 | TCATTGGCTTCTCTTTCCAC | 1 | 1 | NC | NC |
| 2591 | 4142 | TTCATTGGCTTCTCTTTCCA | 2 | 1 | NC | NC |
| 2592 | 4143 | GTTCATTGGCTTCTCTTTCC | 2 | 1 | NC | NC |
| 2593 | 4144 | AGTTCATTGGCTTCTCTTTC | 2 | 2 | NC | NC |
| 2594 | 4145 | AAGTTCATTGGCTTCTCTTT | 2 | 2 | NC | NC |
| 2595 | 4146 | GAAGTTCATTGGCTTCTCTT | 2 | 2 | NC | NC |
| 2596 | 4151 | TCTCCGAAGTTCATTGGCTT | 2 | 2 | NC | NC |
| 2597 | 4152 | CTCTCCGAAGTTCATTGGCT | 1 | 2 | NC | NC |
| 2598 | 4153 | CCTCTCCGAAGTTCATTGGC | 3 | 2 | NC | NC |
| 2599 | 4154 | TCCTCTCCGAAGTTCATTGG | 3 | 2 | NC | NC |
| 2600 | 4155 | TTCCTCTCCGAAGTTCATTG | 2 | 2 | NC | NC |
| 2601 | 4156 | CTTCCTCTCCGAAGTTCATT | 2 | 2 | NC | NC |
| 2602 | 4163 | AGTAGATCTTCCTCTCCGAA | 2 | 3 | NC | NC |
| 2603 | 4164 | CAGTAGATCTTCCTCTCCGA | 2 | 2 | NC | NC |
| 2604 | 4165 | ACAGTAGATCTTCCTCTCCG | 3 | 2 | NC | NC |
| 2605 | 4166 | CACAGTAGATCTTCCTCTCC | 2 | 2 | NC | NC |
| 2606 | 4167 | TCACAGTAGATCTTCCTCTC | 2 | 2 | NC | NC |
| 2607 | 4168 | GTCACAGTAGATCTTCCTCT | 2 | 2 | NC | NC |
| 2608 | 4169 | GGTCACAGTAGATCTTCCTC | 2 | 2 | NC | NC |
| 2609 | 4170 | TGGTCACAGTAGATCTTCCT | 2 | 2 | NC | NC |
| 2610 | 4171 | TTGGTCACAGTAGATCTTCC | 2 | 2 | NC | NC |
| 2611 | 4172 | CTTGGTCACAGTAGATCTTC | 2 | 2 | NC | NC |
| 2612 | 4173 | TCTTGGTCACAGTAGATCTT | 2 | 2 | NC | NC |
| 2613 | 4174 | CTCTTGGTCACAGTAGATCT | 2 | 2 | NC | NC |
| 2614 | 4175 | ACTCTTGGTCACAGTAGATC | 2 | 2 | NC | NC |
| 2615 | 4176 | TACTCTTGGTCACAGTAGAT | 2 | 2 | NC | NC |
| 2616 | 4177 | ATACTCTTGGTCACAGTAGA | 2 | 2 | NC | NC |
| 2617 | 4178 | AATACTCTTGGTCACAGTAG | 2 | NC | NC | NC |
| 2618 | 4179 | CAATACTCTTGGTCACAGTA | 2 | NC | NC | NC |
| 2619 | 4180 | ACAATACTCTTGGTCACAGT | 2 | NC | NC | NC |
| 2620 | 4181 | CACAATACTCTTGGTCACAG | 3 | NC | NC | NC |
| 2621 | 4182 | CCACAATACTCTTGGTCACA | 2 | NC | NC | NC |
| 2622 | 4183 | TCCACAATACTCTTGGTCAC | 2 | NC | NC | NC |
| 2623 | 4184 | CTCCACAATACTCTTGGTCA | 2 | NC | NC | NC |
| 2624 | 4185 | CCTCCACAATACTCTTGGTC | 2 | NC | NC | NC |
| 2625 | 4186 | TCCTCCACAATACTCTTGGT | 2 | NC | NC | NC |
| 2626 | 4187 | TTCCTCCACAATACTCTTGG | 2 | NC | NC | NC |
| 2627 | 4188 | ATTCCTCCACAATACTCTTG | 2 | NC | NC | NC |
| 2628 | 4189 | AATTCCTCCACAATACTCTT | 1 | NC | NC | NC |
| 2629 | 4190 | AAATTCCTCCACAATACTCT | 2 | NC | NC | NC |
| 2630 | 4191 | TAAATTCCTCCACAATACTC | 1 | NC | NC | NC |
| 2631 | 4192 | ATAAATTCCTCCACAATACT | 1 | NC | NC | NC |
| 2632 | 4193 | GATAAATTCCTCCACAATAC | 1 | NC | NC | NC |
| 2633 | 4204 | AGTTGTTCTCGGATAAATTC | 2 | NC | NC | NC |
| 2634 | 4205 | CAGTTGTTCTCGGATAAATT | 2 | NC | NC | NC |
| 2635 | 4206 | CCAGTTGTTCTCGGATAAAT | 2 | NC | NC | NC |
| 2636 | 4207 | TCCAGTTGTTCTCGGATAAA | 3 | NC | NC | NC |
| 2637 | 4208 | CTCCAGTTGTTCTCGGATAA | 3 | NC | NC | NC |
| 2638 | 4209 | GCTCCAGTTGTTCTCGGATA | 3 | NC | NC | NC |
| 2639 | 4210 | AGCTCCAGTTGTTCTCGGAT | 2 | NC | NC | NC |
| 2640 | 4211 | TAGCTCCAGTTGTTCTCGGA | 2 | NC | NC | NC |
| 2641 | 4212 | GTAGCTCCAGTTGTTCTCGG | 1 | NC | NC | NC |
| 2642 | 4213 | AGTAGCTCCAGTTGTTCTCG | 2 | NC | NC | NC |
| 2643 | 4214 | GAGTAGCTCCAGTTGTTCTC | 2 | NC | NC | NC |
| 2644 | 4244 | CAATGTCCCTTGGATGCCTC | 2 | 2 | NC | NC |
| 2645 | 4245 | GCAATGTCCCTTGGATGCCT | 2 | 2 | NC | NC |
| 2646 | 4247 | TGGCAATGTCCCTTGGATGC | 2 | 2 | NC | NC |
| 2647 | 4248 | GTGGCAATGTCCCTTGGATG | 2 | 1 | NC | NC |
| 2648 | 4249 | AGTGGCAATGTCCCTTGGAT | 3 | 2 | NC | NC |
| 2649 | 4250 | CAGTGGCAATGTCCCTTGGA | 2 | 1 | NC | NC |
| 2650 | 4251 | TCAGTGGCAATGTCCCTTGG | 2 | 2 | NC | NC |
| 2651 | 4252 | GTCAGTGGCAATGTCCCTTG | 2 | 2 | NC | NC |
| 2652 | 4253 | AGTCAGTGGCAATGTCCCTT | 1 | 2 | NC | NC |
| 2653 | 4254 | CAGTCAGTGGCAATGTCCCT | 2 | 2 | NC | NC |
| 2654 | 4255 | ACAGTCAGTGGCAATGTCCC | 2 | 2 | NC | NC |
| 2655 | 4256 | GACAGTCAGTGGCAATGTCC | 2 | 2 | NC | NC |
| 2656 | 4257 | GGACAGTCAGTGGCAATGTC | 2 | 2 | NC | NC |
| 2657 | 4258 | TGGACAGTCAGTGGCAATGT | 1 | 2 | NC | NC |
| 2658 | 4259 | CTGGACAGTCAGTGGCAATG | 2 | 2 | NC | NC |
| 2659 | 4260 | TCTGGACAGTCAGTGGCAAT | 1 | 2 | NC | NC |
| 2660 | 4261 | TTCTGGACAGTCAGTGGCAA | 1 | 1 | NC | NC |
| 2661 | 4262 | CTTCTGGACAGTCAGTGGCA | 2 | 2 | 2 | NC |
| 2662 | 4264 | ACCTTCTGGACAGTCAGTGG | 2 | 3 | 2 | NC |
| 2663 | 4265 | CACCTTCTGGACAGTCAGTG | 2 | 2 | 1 | NC |
| 2664 | 4266 | ACACCTTCTGGACAGTCAGT | 2 | 2 | 2 | NC |
| 2665 | 4269 | CCAACACCTTCTGGACAGTC | 2 | 2 | 2 | 2 |
| 2666 | 4270 | GCCAACACCTTCTGGACAGT | 2 | 3 | 2 | 2 |
| 2667 | 4271 | TGCCAACACCTTCTGGACAG | 2 | 2 | NC | NC |
| 2668 | 4272 | ATGCCAACACCTTCTGGACA | 2 | 2 | NC | NC |
| 2669 | 4273 | GATGCCAACACCTTCTGGAC | 2 | 3 | NC | NC |
| 2670 | 4274 | GGATGCCAACACCTTCTGGA | 2 | 2 | NC | NC |
| 2671 | 4276 | TGGGATGCCAACACCTTCTG | 2 | 2 | NC | NC |
| 2672 | 4277 | TTGGGATGCCAACACCTTCT | 3 | 2 | NC | NC |
| 2673 | 4278 | CTTGGGATGCCAACACCTTC | 2 | 2 | NC | NC |
| 2674 | 4279 | GCTTGGGATGCCAACACCTT | 2 | 2 | NC | NC |
| 2675 | 4302 | TAAACTTAATGGCCCCATGG | 3 | 2 | NC | NC |
| 2676 | 4303 | TTAAACTTAATGGCCCCATG | 2 | 2 | NC | NC |
| 2677 | 4312 | AGGCCATCATTAAACTTAAT | 2 | 2 | NC | NC |
| 2678 | 4313 | CAGGCCATCATTAAACTTAA | 2 | 2 | NC | NC |
| 2679 | 4314 | TCAGGCCATCATTAAACTTA | 1 | 2 | NC | NC |
| 2680 | 4315 | CTCAGGCCATCATTAAACTT | 1 | 2 | NC | NC |
| 2681 | 4316 | GCTCAGGCCATCATTAAACT | 1 | 2 | NC | NC |
| 2682 | 4330 | CAACTTTCCTGTAAGCTCAG | 1 | 2 | NC | NC |
| 2683 | 4331 | GCAACTTTCCTGTAAGCTCA | 2 | 1 | NC | NC |
| 2684 | 4332 | GGCAACTTTCCTGTAAGCTC | 2 | 2 | NC | NC |
| 2685 | 4333 | CGGCAACTTTCCTGTAAGCT | 2 | 2 | NC | NC |
| 2686 | 4334 | GCGGCAACTTTCCTGTAAGC | 2 | 2 | NC | NC |
| 2687 | 4335 | GGCGGCAACTTTCCTGTAAG | 2 | 3 | NC | NC |
| 2688 | 4336 | AGGCGGCAACTTTCCTGTAA | 2 | 3 | NC | NC |
| 2689 | 4337 | AAGGCGGCAACTTTCCTGTA | 2 | 3 | NC | NC |
| 2690 | 4338 | TAAGGCGGCAACTTTCCTGT | 3 | 2 | NC | NC |
| 2691 | 4339 | ATAAGGCGGCAACTTTCCTG | 3 | 3 | NC | NC |
| 2692 | 4340 | AATAAGGCGGCAACTTTCCT | 2 | 2 | NC | NC |
| 2693 | 4341 | CAATAAGGCGGCAACTTTCC | 2 | 2 | NC | NC |
| 2694 | 4342 | TCAATAAGGCGGCAACTTTC | 2 | 2 | NC | NC |
| 2695 | 4343 | TTCAATAAGGCGGCAACTTT | 2 | 2 | NC | NC |
| 2696 | 4344 | CTTCAATAAGGCGGCAACTT | 3 | NC | NC | NC |
| 2697 | 4345 | GCTTCAATAAGGCGGCAACT | 2 | NC | NC | NC |
| 2698 | 4346 | AGCTTCAATAAGGCGGCAAC | 3 | NC | NC | NC |
| 2699 | 4347 | GAGCTTCAATAAGGCGGCAA | 3 | NC | NC | NC |
| 2700 | 4348 | AGAGCTTCAATAAGGCGGCA | 3 | NC | NC | NC |
| 2701 | 4349 | CAGAGCTTCAATAAGGCGGC | 3 | NC | NC | NC |
| 2702 | 4350 | ACAGAGCTTCAATAAGGCGG | 2 | NC | NC | NC |
| 2703 | 4351 | GACAGAGCTTCAATAAGGCG | 2 | NC | NC | NC |
| 2704 | 4352 | GGACAGAGCTTCAATAAGGC | 2 | NC | NC | NC |
| 2705 | 4353 | AGGACAGAGCTTCAATAAGG | 2 | NC | NC | NC |
| 2706 | 4354 | GAGGACAGAGCTTCAATAAG | 2 | NC | NC | NC |
| 2707 | 4355 | TGAGGACAGAGCTTCAATAA | 2 | NC | NC | NC |
| 2708 | 4356 | ATGAGGACAGAGCTTCAATA | 2 | NC | NC | NC |
| 2709 | 4357 | CATGAGGACAGAGCTTCAAT | 1 | NC | NC | NC |
| 2710 | 4358 | GCATGAGGACAGAGCTTCAA | 2 | NC | NC | NC |
| 2711 | 4359 | GGCATGAGGACAGAGCTTCA | 2 | NC | NC | NC |
| 2712 | 4360 | TGGCATGAGGACAGAGCTTC | 2 | NC | NC | NC |
| 2713 | 4379 | AGCACACTGGAATGGCAGCT | 2 | 2 | NC | NC |
| 2714 | 4381 | TGAGCACACTGGAATGGCAG | 1 | 1 | NC | NC |
| 2715 | 4398 | GCATAGAAGGTCTCCCGTGA | 3 | 2 | NC | NC |
| 2716 | 4399 | AGCATAGAAGGTCTCCCGTG | 2 | 2 | NC | NC |
| 2717 | 4400 | CAGCATAGAAGGTCTCCCGT | 3 | 2 | NC | NC |
| 2718 | 4404 | ACGGCAGCATAGAAGGTCTC | 2 | NC | NC | NC |
| 2719 | 4405 | AACGGCAGCATAGAAGGTCT | 2 | NC | NC | NC |
| 2720 | 4406 | TAACGGCAGCATAGAAGGTC | 2 | NC | NC | NC |
| 2721 | 4407 | CTAACGGCAGCATAGAAGGT | 2 | NC | NC | NC |
| 2722 | 4420 | TGGTCTATGTCAGCTAACGG | 2 | NC | NC | NC |
| 2723 | 4421 | GTGGTCTATGTCAGCTAACG | 3 | NC | NC | NC |
| 2724 | 4422 | AGTGGTCTATGTCAGCTAAC | 2 | NC | NC | NC |
| 2725 | 4423 | AAGTGGTCTATGTCAGCTAA | 2 | 3 | NC | NC |
| 2726 | 4424 | CAAGTGGTCTATGTCAGCTA | 3 | 3 | NC | NC |
| 2727 | 4425 | CCAAGTGGTCTATGTCAGCT | 2 | 2 | NC | NC |
| 2728 | 4426 | TCCAAGTGGTCTATGTCAGC | 2 | 2 | NC | NC |
| 2729 | 4427 | TTCCAAGTGGTCTATGTCAG | 2 | NC | NC | NC |
| 2730 | 4428 | GTTCCAAGTGGTCTATGTCA | 2 | NC | NC | NC |
| 2731 | 4429 | TGTTCCAAGTGGTCTATGTC | 2 | NC | NC | NC |
| 2732 | 4430 | CTGTTCCAAGTGGTCTATGT | 1 | NC | NC | NC |
| 2733 | 4431 | CCTGTTCCAAGTGGTCTATG | 2 | NC | NC | NC |
| 2734 | 4432 | TCCTGTTCCAAGTGGTCTAT | 2 | NC | NC | NC |
| 2735 | 4433 | TTCCTGTTCCAAGTGGTCTA | 2 | NC | NC | NC |
| 2736 | 4434 | TTTCCTGTTCCAAGTGGTCT | 2 | NC | NC | NC |
| 2737 | 4435 | TTTTCCTGTTCCAAGTGGTC | 1 | NC | NC | NC |
| 2738 | 4436 | TTTTTCCTGTTCCAAGTGGT | 2 | NC | NC | NC |
| 2739 | 4437 | GTTTTTCCTGTTCCAAGTGG | 1 | NC | NC | NC |
| 2740 | 4438 | TGTTTTTCCTGTTCCAAGTG | 1 | NC | NC | NC |
| 2741 | 4439 | CTGTTTTTCCTGTTCCAAGT | 2 | NC | NC | NC |
| 2742 | 4440 | TCTGTTTTTCCTGTTCCAAG | 2 | NC | NC | NC |
| 2743 | 4441 | ATCTGTTTTTCCTGTTCCAA | 1 | NC | NC | NC |
| 2744 | 4442 | AATCTGTTTTTCCTGTTCCA | 1 | NC | NC | NC |
| 2745 | 4443 | TAATCTGTTTTTCCTGTTCC | 2 | NC | NC | NC |
| 2746 | 4444 | TTAATCTGTTTTTCCTGTTC | 1 | NC | NC | NC |
| 2747 | 4445 | TTTAATCTGTTTTTCCTGTT | 1 | NC | NC | NC |
| 2748 | 4446 | GTTTAATCTGTTTTTCCTGT | 1 | NC | NC | NC |
| 2749 | 4447 | GGTTTAATCTGTTTTTCCTG | 0 | 0 | NC | NC |
| 2750 | 4448 | GGGTTTAATCTGTTTTTCCT | 1 | 1 | NC | NC |
| 2751 | 4449 | TGGGTTTAATCTGTTTTTCC | 1 | 1 | NC | NC |
| 2752 | 4450 | TTGGGTTTAATCTGTTTTTC | 1 | 0 | NC | NC |
| 2753 | 4451 | GTTGGGTTTAATCTGTTTTT | 1 | NC | NC | NC |
| 2754 | 4452 | GGTTGGGTTTAATCTGTTTT | 1 | NC | NC | NC |
| 2755 | 4453 | AGGTTGGGTTTAATCTGTTT | 2 | NC | NC | NC |
| 2756 | 4454 | GAGGTTGGGTTTAATCTGTT | 2 | NC | NC | NC |
| 2757 | 4455 | TGAGGTTGGGTTTAATCTGT | 2 | NC | NC | NC |
| 2758 | 4456 | GTGAGGTTGGGTTTAATCTG | 2 | NC | NC | NC |
| 2759 | 4457 | AGTGAGGTTGGGTTTAATCT | 2 | NC | NC | NC |
| 2760 | 4458 | TAGTGAGGTTGGGTTTAATC | 2 | NC | NC | NC |
| 2761 | 4459 | TTAGTGAGGTTGGGTTTAAT | 1 | NC | NC | NC |
| 2762 | 4460 | TTTAGTGAGGTTGGGTTTAA | 2 | NC | NC | NC |
| 2763 | 4461 | GTTTAGTGAGGTTGGGTTTA | 2 | NC | NC | NC |
| 2764 | 4462 | AGTTTAGTGAGGTTGGGTTT | 2 | NC | NC | NC |
| 2765 | 4463 | AAGTTTAGTGAGGTTGGGTT | 1 | NC | NC | NC |
| 2766 | 4464 | GAAGTTTAGTGAGGTTGGGT | 2 | NC | NC | NC |
| 2767 | 4465 | CGAAGTTTAGTGAGGTTGGG | 2 | NC | NC | NC |
| 2768 | 4466 | GCGAAGTTTAGTGAGGTTGG | 3 | NC | NC | NC |
| 2769 | 4467 | TGCGAAGTTTAGTGAGGTTG | 3 | NC | NC | NC |
| 2770 | 4468 | TTGCGAAGTTTAGTGAGGTT | 2 | NC | NC | NC |
| 2771 | 4469 | TTTGCGAAGTTTAGTGAGGT | 3 | NC | NC | NC |
| 2772 | 4470 | TTTTGCGAAGTTTAGTGAGG | 2 | NC | NC | NC |
| 2773 | 4471 | ATTTTGCGAAGTTTAGTGAG | 3 | NC | NC | NC |
| 2774 | 4472 | CATTTTGCGAAGTTTAGTGA | 2 | NC | NC | NC |
| 2775 | 4473 | CCATTTTGCGAAGTTTAGTG | 3 | NC | NC | NC |
| 2776 | 4474 | GCCATTTTGCGAAGTTTAGT | 2 | NC | NC | NC |
| 2777 | 4475 | GGCCATTTTGCGAAGTTTAG | 2 | 2 | NC | NC |
| 2778 | 4476 | GGGCCATTTTGCGAAGTTTA | 3 | 3 | NC | NC |
| 2779 | 4477 | TGGGCCATTTTGCGAAGTTT | 2 | 3 | NC | NC |
| 2780 | 4478 | CTGGGCCATTTTGCGAAGTT | 2 | 3 | NC | NC |
| 2781 | 4479 | CCTGGGCCATTTTGCGAAGT | 2 | 3 | NC | NC |
| 2782 | 4498 | TTTCCAAAGAGACGCCAGGC | 2 | 2 | NC | NC |
| 2783 | 4499 | TTTTCCAAAGAGACGCCAGG | 2 | 2 | NC | NC |
| 2784 | 4500 | CTTTTCCAAAGAGACGCCAG | 2 | 2 | NC | NC |
| 2785 | 4501 | GCTTTTCCAAAGAGACGCCA | 2 | 2 | NC | NC |
| 2786 | 4502 | TGCTTTTCCAAAGAGACGCC | 1 | 1 | NC | NC |
| 2787 | 4503 | CTGCTTTTCCAAAGAGACGC | 1 | 1 | NC | NC |
| 2788 | 4504 | TCTGCTTTTCCAAAGAGACG | 1 | 1 | NC | NC |
| 2789 | 4505 | CTCTGCTTTTCCAAAGAGAC | 2 | 2 | NC | NC |
| 2790 | 4506 | ACTCTGCTTTTCCAAAGAGA | 1 | 1 | NC | NC |
| 2791 | 4508 | ACACTCTGCTTTTCCAAAGA | 2 | 2 | NC | NC |
| 2792 | 4509 | CACACTCTGCTTTTCCAAAG | 2 | 2 | NC | NC |
| 2793 | 4510 | TCACACTCTGCTTTTCCAAA | 1 | 2 | NC | NC |
| 2794 | 4511 | ATCACACTCTGCTTTTCCAA | 2 | 1 | NC | NC |
| 2795 | 4512 | TATCACACTCTGCTTTTCCA | 2 | 2 | NC | NC |
| 2796 | 4513 | GTATCACACTCTGCTTTTCC | 1 | 2 | NC | NC |
| 2797 | 4514 | TGTATCACACTCTGCTTTTC | 2 | 2 | NC | NC |
| 2798 | 4515 | TTGTATCACACTCTGCTTTT | 1 | 1 | NC | NC |
| 2799 | 4516 | CTTGTATCACACTCTGCTTT | 1 | NC | NC | NC |
| 2800 | 4517 | CCTTGTATCACACTCTGCTT | 1 | NC | NC | NC |
| 2801 | 4518 | GCCTTGTATCACACTCTGCT | 2 | NC | NC | NC |
| 2802 | 4519 | TGCCTTGTATCACACTCTGC | 2 | NC | NC | NC |
| 2803 | 4520 | CTGCCTTGTATCACACTCTG | 2 | NC | NC | NC |
| 2804 | 4521 | TCTGCCTTGTATCACACTCT | 1 | NC | NC | NC |
| 2805 | 4522 | CTCTGCCTTGTATCACACTC | 2 | NC | NC | NC |
| 2806 | 4523 | GCTCTGCCTTGTATCACACT | 2 | NC | NC | NC |
| 2807 | 4549 | TCACAGGGAGGCATGGATTG | 2 | 2 | NC | NC |
| 2808 | 4562 | TTCTCATGGTGGCTCACAGG | 2 | 2 | NC | NC |
| 2809 | 4563 | GTTCTCATGGTGGCTCACAG | 2 | 2 | NC | NC |
| 2810 | 4564 | TGTTCTCATGGTGGCTCACA | 2 | 2 | NC | NC |
| 2811 | 4565 | CTGTTCTCATGGTGGCTCAC | 2 | 2 | NC | NC |
| 2812 | 4566 | TCTGTTCTCATGGTGGCTCA | 1 | 2 | NC | NC |
| 2813 | 4567 | TTCTGTTCTCATGGTGGCTC | 2 | 2 | NC | NC |
| 2814 | 4568 | ATTCTGTTCTCATGGTGGCT | 2 | 2 | NC | NC |
| 2815 | 4569 | GATTCTGTTCTCATGGTGGC | 2 | 2 | NC | NC |
| 2816 | 4570 | TGATTCTGTTCTCATGGTGG | 2 | 2 | NC | NC |
| 2817 | 4571 | GTGATTCTGTTCTCATGGTG | 2 | 2 | NC | NC |
| 2818 | 4572 | AGTGATTCTGTTCTCATGGT | 2 | 2 | NC | NC |
| 2819 | 4577 | AGACCAGTGATTCTGTTCTC | 2 | 2 | NC | NC |
| 2820 | 4583 | CCTTTTAGACCAGTGATTCT | 1 | NC | NC | NC |
| 2821 | 4584 | TCCTTTTAGACCAGTGATTC | 1 | NC | NC | NC |
| 2822 | 4585 | TTCCTTTTAGACCAGTGATT | 2 | NC | NC | NC |
| 2823 | 4586 | GTTCCTTTTAGACCAGTGAT | 2 | NC | NC | NC |
| 2824 | 4587 | TGTTCCTTTTAGACCAGTGA | 2 | NC | NC | NC |
| 2825 | 4588 | TTGTTCCTTTTAGACCAGTG | 2 | NC | NC | NC |
| 2826 | 4589 | TTTGTTCCTTTTAGACCAGT | 1 | NC | NC | NC |
| 2827 | 4590 | CTTTGTTCCTTTTAGACCAG | 2 | NC | NC | NC |
| 2828 | 4591 | CCTTTGTTCCTTTTAGACCA | 2 | NC | NC | NC |
| 2829 | 4592 | CCCTTTGTTCCTTTTAGACC | 2 | NC | NC | NC |
| 2830 | 4593 | TCCCTTTGTTCCTTTTAGAC | 2 | NC | NC | NC |
| 2831 | 4594 | ATCCCTTTGTTCCTTTTAGA | 2 | NC | NC | NC |
| 2832 | 4595 | CATCCCTTTGTTCCTTTTAG | 2 | NC | NC | NC |
| 2833 | 4596 | ACATCCCTTTGTTCCTTTTA | 2 | NC | NC | NC |
| 2834 | 4597 | AACATCCCTTTGTTCCTTTT | 2 | NC | NC | NC |
| 2835 | 4604 | TACAGTGAACATCCCTTTGT | 2 | NC | NC | NC |
| 2836 | 4605 | ATACAGTGAACATCCCTTTG | 2 | NC | NC | NC |
| 2837 | 4606 | CATACAGTGAACATCCCTTT | 2 | NC | NC | NC |
| 2838 | 4607 | GCATACAGTGAACATCCCTT | 2 | NC | NC | NC |
| 2839 | 4608 | GGCATACAGTGAACATCCCT | 2 | NC | NC | NC |
| 2840 | 4609 | AGGCATACAGTGAACATCCC | 2 | NC | NC | NC |
| 2841 | 4610 | GAGGCATACAGTGAACATCC | 2 | NC | NC | NC |
| 2842 | 4611 | AGAGGCATACAGTGAACATC | 1 | NC | NC | NC |
| 2843 | 4612 | CAGAGGCATACAGTGAACAT | 2 | NC | NC | NC |
| 2844 | 4613 | TCAGAGGCATACAGTGAACA | 2 | NC | NC | NC |
| 2845 | 4614 | CTCAGAGGCATACAGTGAAC | 1 | NC | NC | NC |
| 2846 | 4615 | GCTCAGAGGCATACAGTGAA | 1 | 2 | NC | NC |
| 2847 | 4616 | TGCTCAGAGGCATACAGTGA | 1 | 2 | NC | NC |
| 2848 | 4672 | AGGGACACTGGGCTGATTCA | 2 | 2 | NC | NC |
| 2849 | 4683 | CTAAGCTGCTCAGGGACACT | 2 | 2 | NC | NC |
| 2850 | 4684 | TCTAAGCTGCTCAGGGACAC | 2 | 2 | NC | NC |
| 2851 | 4685 | GTCTAAGCTGCTCAGGGACA | 2 | 1 | NC | NC |
| 2852 | 4686 | TGTCTAAGCTGCTCAGGGAC | 2 | 2 | NC | NC |
| 2853 | 4687 | CTGTCTAAGCTGCTCAGGGA | 2 | NC | NC | NC |
| 2854 | 4704 | TGATACAGAGAGCCCTGCTG | 2 | NC | NC | NC |
| 2855 | 4705 | CTGATACAGAGAGCCCTGCT | 2 | NC | NC | NC |
| 2856 | 4706 | ACTGATACAGAGAGCCCTGC | 2 | NC | NC | NC |
| 2857 | 4708 | AGACTGATACAGAGAGCCCT | 2 | NC | NC | NC |
| 2858 | 4709 | AAGACTGATACAGAGAGCCC | 2 | NC | NC | NC |
| 2859 | 4710 | AAAGACTGATACAGAGAGCC | 2 | NC | NC | NC |
| 2860 | 4711 | GAAAGACTGATACAGAGAGC | 1 | NC | NC | NC |
| 2861 | 4712 | AGAAAGACTGATACAGAGAG | 1 | NC | NC | NC |
| 2862 | 4713 | AAGAAAGACTGATACAGAGA | 2 | NC | NC | NC |
| 2863 | 4714 | CAAGAAAGACTGATACAGAG | 2 | NC | NC | NC |
| 2864 | 4715 | TCAAGAAAGACTGATACAGA | 2 | NC | NC | NC |
| 2865 | 4717 | GCTCAAGAAAGACTGATACA | 2 | NC | NC | NC |
| 2866 | 4718 | TGCTCAAGAAAGACTGATAC | 2 | NC | NC | NC |
| 2867 | 4719 | CTGCTCAAGAAAGACTGATA | 2 | NC | NC | NC |
| 2868 | 4720 | TCTGCTCAAGAAAGACTGAT | 2 | NC | NC | NC |
| 2869 | 4721 | ATCTGCTCAAGAAAGACTGA | 2 | NC | NC | NC |
| 2870 | 4722 | CATCTGCTCAAGAAAGACTG | 2 | NC | NC | NC |
| 2871 | 4723 | TCATCTGCTCAAGAAAGACT | 2 | NC | NC | NC |
| 2872 | 4724 | ATCATCTGCTCAAGAAAGAC | 2 | NC | NC | NC |
| 2873 | 4725 | AATCATCTGCTCAAGAAAGA | 2 | NC | NC | NC |
| 2874 | 4726 | GAATCATCTGCTCAAGAAAG | 2 | NC | NC | NC |
| 2875 | 4727 | GGAATCATCTGCTCAAGAAA | 2 | 2 | NC | NC |
| 2876 | 4728 | GGGAATCATCTGCTCAAGAA | 2 | NC | NC | NC |
| 2877 | 4746 | ATCTGGCTACTCAACTAGGG | 2 | NC | NC | NC |
| 2878 | 4747 | CATCTGGCTACTCAACTAGG | 2 | NC | NC | NC |
| 2879 | 4748 | TCATCTGGCTACTCAACTAG | 2 | NC | NC | NC |
| 2880 | 4749 | TTCATCTGGCTACTCAACTA | 2 | NC | NC | NC |
| 2881 | 4750 | TTTCATCTGGCTACTCAACT | 2 | NC | NC | NC |
| 2882 | 4751 | ATTTCATCTGGCTACTCAAC | 2 | NC | NC | NC |
| 2883 | 4752 | AATTTCATCTGGCTACTCAA | 2 | NC | NC | NC |
| 2884 | 4753 | GAATTTCATCTGGCTACTCA | 2 | NC | NC | NC |
| 2885 | 4754 | TGAATTTCATCTGGCTACTC | 2 | NC | NC | NC |
| 2886 | 4755 | TTGAATTTCATCTGGCTACT | 2 | NC | NC | NC |
| 2887 | 4756 | CTTGAATTTCATCTGGCTAC | 2 | NC | NC | NC |
| 2888 | 4757 | GCTTGAATTTCATCTGGCTA | 2 | NC | NC | NC |
| 2889 | 4758 | GGCTTGAATTTCATCTGGCT | 2 | NC | NC | NC |
| 2890 | 4759 | AGGCTTGAATTTCATCTGGC | 2 | NC | NC | NC |
| 2891 | 4760 | TAGGCTTGAATTTCATCTGG | 2 | NC | NC | NC |
| 2892 | 4761 | TTAGGCTTGAATTTCATCTG | 3 | NC | NC | NC |
| 2893 | 4762 | TTTAGGCTTGAATTTCATCT | 2 | NC | NC | NC |
| 2894 | 4763 | CTTTAGGCTTGAATTTCATC | 2 | NC | NC | NC |
| 2895 | 4764 | TCTTTAGGCTTGAATTTCAT | 2 | NC | NC | NC |
| 2896 | 4765 | GTCTTTAGGCTTGAATTTCA | 2 | NC | NC | NC |
| 2897 | 4766 | TGTCTTTAGGCTTGAATTTC | 2 | NC | NC | NC |
| 2898 | 4767 | TTGTCTTTAGGCTTGAATTT | 2 | NC | NC | NC |
| 2899 | 4768 | ATTGTCTTTAGGCTTGAATT | 2 | NC | NC | NC |
| 2900 | 4769 | AATTGTCTTTAGGCTTGAAT | 2 | NC | NC | NC |
| 2901 | 4770 | GAATTGTCTTTAGGCTTGAA | 2 | NC | NC | NC |
| 2902 | 4771 | TGAATTGTCTTTAGGCTTGA | 2 | NC | NC | NC |
| 2903 | 4772 | ATGAATTGTCTTTAGGCTTG | 2 | NC | NC | NC |
| 2904 | 4773 | AATGAATTGTCTTTAGGCTT | 2 | NC | NC | NC |
| 2905 | 4774 | GAATGAATTGTCTTTAGGCT | 2 | NC | NC | NC |
| 2906 | 4775 | TGAATGAATTGTCTTTAGGC | 1 | NC | NC | NC |
| 2907 | 4776 | ATGAATGAATTGTCTTTAGG | 2 | NC | NC | NC |
| 2908 | 4777 | AATGAATGAATTGTCTTTAG | 1 | NC | NC | NC |
| 2909 | 4779 | CAAATGAATGAATTGTCTTT | 1 | NC | NC | NC |
| 2910 | 4780 | GCAAATGAATGAATTGTCTT | 2 | NC | NC | NC |
| 2911 | 4781 | TGCAAATGAATGAATTGTCT | 2 | NC | NC | NC |
| 2912 | 4782 | ATGCAAATGAATGAATTGTC | 2 | NC | NC | NC |
| 2913 | 4783 | GATGCAAATGAATGAATTGT | 2 | NC | NC | NC |
| 2914 | 4784 | GGATGCAAATGAATGAATTG | 2 | NC | NC | NC |
| 2915 | 4785 | TGGATGCAAATGAATGAATT | 2 | NC | NC | NC |
| 2916 | 4786 | ATGGATGCAAATGAATGAAT | 2 | NC | NC | NC |
| 2917 | 4787 | CATGGATGCAAATGAATGAA | 2 | 2 | NC | NC |
| 2918 | 4788 | CCATGGATGCAAATGAATGA | 2 | 2 | NC | NC |
| 2919 | 4789 | CCCATGGATGCAAATGAATG | 2 | NC | NC | NC |
| 2920 | 4790 | GCCCATGGATGCAAATGAAT | 2 | NC | NC | NC |
| 2921 | 4791 | TGCCCATGGATGCAAATGAA | 2 | NC | NC | NC |
| 2922 | 4797 | CTTCTGTGCCCATGGATGCA | 2 | NC | NC | NC |
| 2923 | 4799 | ACCTTCTGTGCCCATGGATG | 2 | NC | NC | NC |
| 2924 | 4800 | AACCTTCTGTGCCCATGGAT | 1 | NC | NC | NC |
| 2925 | 4801 | CAACCTTCTGTGCCCATGGA | 2 | NC | NC | NC |
| 2926 | 4803 | AGCAACCTTCTGTGCCCATG | 2 | NC | NC | NC |
| 2927 | 4804 | TAGCAACCTTCTGTGCCCAT | 2 | NC | NC | NC |
| 2928 | 4805 | ATAGCAACCTTCTGTGCCCA | 3 | NC | NC | NC |
| 2929 | 4806 | TATAGCAACCTTCTGTGCCC | 2 | NC | NC | NC |
| 2930 | 4807 | ATATAGCAACCTTCTGTGCC | 2 | NC | NC | NC |
| 2931 | 4808 | TATATAGCAACCTTCTGTGC | 1 | NC | NC | NC |
| 2932 | 4809 | CTATATAGCAACCTTCTGTG | 2 | NC | NC | NC |
| 2933 | 4810 | ACTATATAGCAACCTTCTGT | 2 | NC | NC | NC |
| 2934 | 4811 | TACTATATAGCAACCTTCTG | 2 | NC | NC | NC |
| 2935 | 4812 | ATACTATATAGCAACCTTCT | 2 | NC | NC | NC |
| 2936 | 4813 | GATACTATATAGCAACCTTC | 2 | NC | NC | NC |
| 2937 | 4814 | AGATACTATATAGCAACCTT | 2 | NC | NC | NC |
| 2938 | 4815 | TAGATACTATATAGCAACCT | 1 | NC | NC | NC |
| 2939 | 4816 | GTAGATACTATATAGCAACC | 2 | NC | NC | NC |
| 2940 | 4817 | GGTAGATACTATATAGCAAC | 3 | NC | NC | NC |
| 2941 | 4818 | AGGTAGATACTATATAGCAA | 2 | NC | NC | NC |
| 2942 | 4819 | AAGGTAGATACTATATAGCA | 2 | NC | NC | NC |
| 2943 | 4820 | AAAGGTAGATACTATATAGC | 2 | NC | NC | NC |
| 2944 | 4821 | AAAAGGTAGATACTATATAG | 2 | NC | NC | NC |
| 2945 | 4822 | CAAAAGGTAGATACTATATA | 1 | NC | NC | NC |
| 2946 | 4823 | GCAAAAGGTAGATACTATAT | 2 | 2 | NC | NC |
| 2947 | 4824 | AGCAAAAGGTAGATACTATA | 1 | 1 | NC | NC |
| 2948 | 4825 | TAGCAAAAGGTAGATACTAT | 1 | 1 | NC | NC |
| 2949 | 4826 | GTAGCAAAAGGTAGATACTA | 2 | 2 | NC | NC |
| 2950 | 4827 | AGTAGCAAAAGGTAGATACT | 2 | 2 | NC | NC |
| 2951 | 4828 | AAGTAGCAAAAGGTAGATAC | 2 | 2 | NC | NC |
| 2952 | 4829 | TAAGTAGCAAAAGGTAGATA | 1 | 1 | NC | NC |
| 2953 | 4830 | ATAAGTAGCAAAAGGTAGAT | 1 | 2 | NC | NC |
| 2954 | 4831 | AATAAGTAGCAAAAGGTAGA | 1 | 2 | NC | NC |
| 2955 | 4832 | AAATAAGTAGCAAAAGGTAG | 1 | 1 | NC | NC |
| 2956 | 4833 | TAAATAAGTAGCAAAAGGTA | 1 | 2 | NC | NC |
| 2957 | 4834 | TTAAATAAGTAGCAAAAGGT | 1 | 2 | NC | NC |
| 2958 | 4835 | ATTAAATAAGTAGCAAAAGG | 1 | 1 | NC | NC |
| 2959 | 4836 | CATTAAATAAGTAGCAAAAG | 0 | 2 | NC | NC |
| 2960 | 4861 | CAATCAAACTGTCATTAAAT | 2 | NC | NC | NC |
| 2961 | 4862 | CCAATCAAACTGTCATTAAA | 2 | NC | NC | NC |
| 2962 | 4863 | ACCAATCAAACTGTCATTAA | 2 | NC | NC | NC |
| 2963 | 4864 | AACCAATCAAACTGTCATTA | 2 | NC | NC | NC |
| 2964 | 4865 | CAACCAATCAAACTGTCATT | 2 | NC | NC | NC |
| 2965 | 4866 | GCAACCAATCAAACTGTCAT | 1 | NC | NC | NC |
| 2966 | 4867 | AGCAACCAATCAAACTGTCA | 1 | NC | NC | NC |
| 2967 | 4868 | AAGCAACCAATCAAACTGTC | 2 | NC | NC | NC |
| 2968 | 4869 | CAAGCAACCAATCAAACTGT | 2 | NC | NC | NC |
| 2969 | 4870 | CCAAGCAACCAATCAAACTG | 2 | NC | NC | NC |
| 2970 | 4871 | ACCAAGCAACCAATCAAACT | 2 | NC | NC | NC |
| 2971 | 4872 | AACCAAGCAACCAATCAAAC | 1 | NC | NC | NC |
| 2972 | 4873 | AAACCAAGCAACCAATCAAA | 1 | NC | NC | NC |
| 2973 | 4874 | CAAACCAAGCAACCAATCAA | 1 | NC | NC | NC |
| 2974 | 4875 | ACAAACCAAGCAACCAATCA | 1 | NC | NC | NC |
| 2975 | 4876 | AACAAACCAAGCAACCAATC | 1 | NC | NC | NC |
| 2976 | 4877 | TAACAAACCAAGCAACCAAT | 2 | NC | NC | NC |
| 2977 | 4878 | ATAACAAACCAAGCAACCAA | 1 | NC | NC | NC |
| 2978 | 4879 | AATAACAAACCAAGCAACCA | 2 | NC | NC | NC |
| 2979 | 4880 | AAATAACAAACCAAGCAACC | 1 | NC | NC | NC |
| 2980 | 4881 | CAAATAACAAACCAAGCAAC | 1 | NC | NC | NC |
| 2981 | 4882 | TCAAATAACAAACCAAGCAA | 2 | NC | NC | NC |
| 2982 | 4883 | TTCAAATAACAAACCAAGCA | 2 | NC | NC | NC |
| 2983 | 4884 | CTTCAAATAACAAACCAAGC | 2 | NC | NC | NC |
| 2984 | 4885 | CCTTCAAATAACAAACCAAG | 2 | NC | NC | NC |
| 2985 | 4886 | CCCTTCAAATAACAAACCAA | 2 | NC | NC | NC |
| 2986 | 4887 | ACCCTTCAAATAACAAACCA | 2 | NC | NC | NC |
| 2987 | 4888 | CACCCTTCAAATAACAAACC | 2 | NC | NC | NC |
| 2988 | 4889 | ACACCCTTCAAATAACAAAC | 2 | NC | NC | NC |
| 2989 | 4890 | CACACCCTTCAAATAACAAA | 2 | NC | NC | NC |
| 2990 | 4891 | TCACACCCTTCAAATAACAA | 2 | NC | NC | NC |
| 2991 | 4892 | ATCACACCCTTCAAATAACA | 2 | NC | NC | NC |
| 2992 | 4893 | AATCACACCCTTCAAATAAC | 2 | NC | NC | NC |
| 2993 | 4894 | AAATCACACCCTTCAAATAA | 2 | NC | NC | NC |
| 2994 | 4895 | AAAATCACACCCTTCAAATA | 2 | NC | NC | NC |
| 2995 | 4896 | AAAAATCACACCCTTCAAAT | 1 | NC | NC | NC |
| 2996 | 4897 | CAAAAATCACACCCTTCAAA | 1 | NC | NC | NC |
| 2997 | 4898 | ACAAAAATCACACCCTTCAA | 1 | NC | NC | NC |
| 2998 | 4899 | AACAAAAATCACACCCTTCA | 2 | NC | NC | NC |
| 2999 | 4900 | AAACAAAAATCACACCCTTC | 1 | NC | NC | NC |
| 3000 | 4901 | AAAACAAAAATCACACCCTT | 1 | NC | NC | NC |
| 3001 | 4902 | AAAAACAAAAATCACACCCT | 0 | NC | NC | NC |
| 3002 | 4903 | CAAAAACAAAAATCACACCC | 0 | NC | NC | NC |
| 3003 | 4904 | ACAAAAACAAAAATCACACC | 0 | NC | NC | NC |
| 3004 | 4905 | TACAAAAACAAAAATCACAC | 1 | NC | NC | NC |
| 3005 | 4906 | GTACAAAAACAAAAATCACA | 1 | NC | NC | NC |
| 3006 | 4907 | TGTACAAAAACAAAAATCAC | 1 | NC | NC | NC |
| 3007 | 4908 | CTGTACAAAAACAAAAATCA | 1 | NC | NC | NC |
| 3008 | 4909 | ACTGTACAAAAACAAAAATC | 1 | NC | NC | NC |
| 3009 | 4931 | CAAATGTGAAGCTTGAAAAA | 2 | NC | NC | NC |
| 3010 | 4932 | GCAAATGTGAAGCTTGAAAA | 2 | NC | NC | NC |
| 3011 | 4933 | CGCAAATGTGAAGCTTGAAA | 2 | NC | NC | NC |
| 3012 | 4934 | ACGCAAATGTGAAGCTTGAA | 2 | NC | NC | NC |
| 3013 | 4944 | AATTAGATACACGCAAATGT | 2 | NC | NC | NC |
| 3014 | 4945 | GAATTAGATACACGCAAATG | 3 | NC | NC | NC |
| 3015 | 4946 | TGAATTAGATACACGCAAAT | 3 | NC | NC | NC |
| 3016 | 4947 | CTGAATTAGATACACGCAAA | 3 | NC | NC | NC |
| 3017 | 4948 | GCTGAATTAGATACACGCAA | 2 | NC | NC | NC |
| 3018 | 4949 | AGCTGAATTAGATACACGCA | 2 | NC | NC | NC |
| 3019 | 4950 | CAGCTGAATTAGATACACGC | 2 | NC | NC | NC |
| 3020 | 4951 | TCAGCTGAATTAGATACACG | 2 | NC | NC | NC |
| 3021 | 4952 | ATCAGCTGAATTAGATACAC | 1 | NC | NC | NC |
| 3022 | 4953 | CATCAGCTGAATTAGATACA | 2 | NC | NC | NC |
| 3023 | 4969 | ACCCCTTGGACTTGAGCATC | 2 | NC | NC | NC |
| 3024 | 4970 | TACCCCTTGGACTTGAGCAT | 1 | NC | NC | NC |
| 3025 | 4971 | CTACCCCTTGGACTTGAGCA | 2 | NC | NC | NC |
| 3026 | 4972 | ACTACCCCTTGGACTTGAGC | 2 | NC | NC | NC |
| 3027 | 4973 | GACTACCCCTTGGACTTGAG | 2 | NC | NC | NC |
| 3028 | 4974 | AGACTACCCCTTGGACTTGA | 2 | NC | NC | NC |
| 3029 | 4975 | CAGACTACCCCTTGGACTTG | 2 | NC | NC | NC |
| 3030 | 4976 | GCAGACTACCCCTTGGACTT | 3 | NC | NC | NC |
| 3031 | 4979 | AAGGCAGACTACCCCTTGGA | 2 | NC | NC | NC |
| 3032 | 5031 | AGACTGAAGGGAAAAGAGGG | 2 | NC | NC | NC |
| 3033 | 5032 | AAGACTGAAGGGAAAAGAGG | 1 | NC | NC | NC |
| 3034 | 5033 | GAAGACTGAAGGGAAAAGAG | 1 | NC | NC | NC |
| 3035 | 5034 | AGAAGACTGAAGGGAAAAGA | 2 | NC | NC | NC |
| 3036 | 5035 | AAGAAGACTGAAGGGAAAAG | 2 | NC | NC | NC |
| 3037 | 5036 | GAAGAAGACTGAAGGGAAAA | 1 | NC | NC | NC |
| 3038 | 5037 | TGAAGAAGACTGAAGGGAAA | 1 | NC | NC | NC |
| 3039 | 5038 | GTGAAGAAGACTGAAGGGAA | 1 | NC | NC | NC |
| 3040 | 5039 | AGTGAAGAAGACTGAAGGGA | 1 | NC | NC | NC |
| 3041 | 5040 | AAGTGAAGAAGACTGAAGGG | 1 | NC | NC | NC |
| 3042 | 5041 | GAAGTGAAGAAGACTGAAGG | 2 | NC | NC | NC |
| 3043 | 5042 | GGAAGTGAAGAAGACTGAAG | 2 | NC | NC | NC |
| 3044 | 5043 | GGGAAGTGAAGAAGACTGAA | 1 | NC | NC | NC |
| 3045 | 5044 | AGGGAAGTGAAGAAGACTGA | 2 | NC | NC | NC |
| 3046 | 5045 | TAGGGAAGTGAAGAAGACTG | 2 | NC | NC | NC |
| 3047 | 5046 | ATAGGGAAGTGAAGAAGACT | 2 | NC | NC | NC |
| 3048 | 5047 | CATAGGGAAGTGAAGAAGAC | 2 | NC | NC | NC |
| 3049 | 5048 | GCATAGGGAAGTGAAGAAGA | 2 | NC | NC | NC |
| 3050 | 5049 | AGCATAGGGAAGTGAAGAAG | 2 | NC | NC | NC |
| 3051 | 5050 | CAGCATAGGGAAGTGAAGAA | 1 | NC | NC | NC |
| 3052 | 5051 | GCAGCATAGGGAAGTGAAGA | 2 | NC | NC | NC |
| 3053 | 5052 | AGCAGCATAGGGAAGTGAAG | 2 | NC | NC | NC |
| 3054 | 5053 | CAGCAGCATAGGGAAGTGAA | 2 | NC | NC | NC |
| 3055 | 5067 | TGTAGCACATGAAGCAGCAG | 2 | NC | NC | NC |
| 3056 | 5068 | ATGTAGCACATGAAGCAGCA | 2 | NC | NC | NC |
| 3057 | 5069 | GATGTAGCACATGAAGCAGC | 2 | NC | NC | NC |
| 3058 | 5070 | AGATGTAGCACATGAAGCAG | 2 | NC | NC | NC |
| 3059 | 5071 | GAGATGTAGCACATGAAGCA | 2 | NC | NC | NC |
| 3060 | 5072 | TGAGATGTAGCACATGAAGC | 2 | NC | NC | NC |
| 3061 | 5073 | CTGAGATGTAGCACATGAAG | 2 | NC | NC | NC |
| 3062 | 5074 | TCTGAGATGTAGCACATGAA | 2 | NC | NC | NC |
| 3063 | 5075 | GTCTGAGATGTAGCACATGA | 2 | NC | NC | NC |
| 3064 | 5076 | AGTCTGAGATGTAGCACATG | 2 | NC | NC | NC |
| 3065 | 5078 | TAAGTCTGAGATGTAGCACA | 2 | NC | NC | NC |
| 3066 | 5079 | TTAAGTCTGAGATGTAGCAC | 2 | NC | NC | NC |
| 3067 | 5080 | TTTAAGTCTGAGATGTAGCA | 2 | NC | NC | NC |
| 3068 | 5081 | CTTTAAGTCTGAGATGTAGC | 2 | NC | NC | NC |
| 3069 | 5082 | TCTTTAAGTCTGAGATGTAG | 2 | NC | NC | NC |
| 3070 | 5083 | CTCTTTAAGTCTGAGATGTA | 2 | NC | NC | NC |
| 3071 | 5084 | ACTCTTTAAGTCTGAGATGT | 1 | NC | NC | NC |
| 3072 | 5085 | AACTCTTTAAGTCTGAGATG | 2 | NC | NC | NC |
| 3073 | 5086 | AAACTCTTTAAGTCTGAGAT | 2 | NC | NC | NC |
| 3074 | 5087 | GAAACTCTTTAAGTCTGAGA | 2 | NC | NC | NC |
| 3075 | 5088 | AGAAACTCTTTAAGTCTGAG | 1 | NC | NC | NC |
| 3076 | 5089 | GAGAAACTCTTTAAGTCTGA | 2 | NC | NC | NC |
| 3077 | 5090 | AGAGAAACTCTTTAAGTCTG | 2 | NC | NC | NC |
| 3078 | 5100 | TCACTGTAGTAGAGAAACTC | 2 | NC | NC | NC |
| 3079 | 5101 | TTCACTGTAGTAGAGAAACT | 2 | NC | NC | NC |
| 3080 | 5102 | TTTCACTGTAGTAGAGAAAC | 1 | NC | NC | NC |
| 3081 | 5104 | GTTTTCACTGTAGTAGAGAA | 1 | NC | NC | NC |
| 3082 | 5105 | TGTTTTCACTGTAGTAGAGA | 1 | NC | NC | NC |
| 3083 | 5106 | ATGTTTTCACTGTAGTAGAG | 1 | NC | NC | NC |
| 3084 | 5107 | AATGTTTTCACTGTAGTAGA | 1 | NC | NC | NC |
| 3085 | 5108 | GAATGTTTTCACTGTAGTAG | 2 | NC | NC | NC |
| 3086 | 5109 | AGAATGTTTTCACTGTAGTA | 2 | NC | NC | NC |
| 3087 | 5110 | GAGAATGTTTTCACTGTAGT | 2 | NC | NC | NC |
| 3088 | 5111 | AGAGAATGTTTTCACTGTAG | 2 | NC | NC | NC |
| 3089 | 5112 | TAGAGAATGTTTTCACTGTA | 2 | NC | NC | NC |
| 3090 | 5113 | CTAGAGAATGTTTTCACTGT | 2 | NC | NC | NC |
| 3091 | 5114 | CCTAGAGAATGTTTTCACTG | 2 | NC | NC | NC |
| 3092 | 5115 | CCCTAGAGAATGTTTTCACT | 2 | NC | NC | NC |
| 3093 | 5116 | ACCCTAGAGAATGTTTTCAC | 2 | NC | NC | NC |
| 3094 | 5117 | GACCCTAGAGAATGTTTTCA | 2 | NC | NC | NC |
| 3095 | 5118 | AGACCCTAGAGAATGTTTTC | 2 | NC | NC | NC |
| 3096 | 5119 | AAGACCCTAGAGAATGTTTT | 2 | NC | NC | NC |
| 3097 | 5120 | AAAGACCCTAGAGAATGTTT | 2 | NC | NC | NC |
| 3098 | 5121 | GAAAGACCCTAGAGAATGTT | 1 | NC | NC | NC |
| 3099 | 5122 | TGAAAGACCCTAGAGAATGT | 2 | NC | NC | NC |
| 3100 | 5123 | ATGAAAGACCCTAGAGAATG | 1 | NC | NC | NC |
| 3101 | 5124 | GATGAAAGACCCTAGAGAAT | 2 | NC | NC | NC |
| 3102 | 5125 | TGATGAAAGACCCTAGAGAA | 2 | NC | NC | NC |
| 3103 | 5126 | CTGATGAAAGACCCTAGAGA | 1 | NC | NC | NC |
| 3104 | 5127 | CCTGATGAAAGACCCTAGAG | 1 | NC | NC | NC |
| 3105 | 5128 | GCCTGATGAAAGACCCTAGA | 2 | NC | NC | NC |
| 3106 | 5129 | GGCCTGATGAAAGACCCTAG | 2 | NC | NC | NC |
| 3107 | 5130 | AGGCCTGATGAAAGACCCTA | 2 | NC | NC | NC |
| 3108 | 5131 | AAGGCCTGATGAAAGACCCT | 2 | NC | NC | NC |
| 3109 | 5132 | AAAGGCCTGATGAAAGACCC | 2 | NC | NC | NC |
| 3110 | 5133 | TAAAGGCCTGATGAAAGACC | 2 | NC | NC | NC |
| 3111 | 5134 | CTAAAGGCCTGATGAAAGAC | 2 | NC | NC | NC |
| 3112 | 5135 | ACTAAAGGCCTGATGAAAGA | 2 | NC | NC | NC |
| 3113 | 5136 | AACTAAAGGCCTGATGAAAG | 2 | NC | NC | NC |
| 3114 | 5137 | TAACTAAAGGCCTGATGAAA | 2 | NC | NC | NC |
| 3115 | 5138 | ATAACTAAAGGCCTGATGAA | 2 | NC | NC | NC |
| 3116 | 5139 | AATAACTAAAGGCCTGATGA | 2 | NC | NC | NC |
| 3117 | 5140 | AAATAACTAAAGGCCTGATG | 2 | NC | NC | NC |
| 3118 | 5141 | AAAATAACTAAAGGCCTGAT | 2 | NC | NC | NC |
| 3119 | 5142 | TAAAATAACTAAAGGCCTGA | 2 | NC | NC | NC |
| 3120 | 5143 | CTAAAATAACTAAAGGCCTG | 2 | NC | NC | NC |
| 3121 | 5144 | CCTAAAATAACTAAAGGCCT | 1 | NC | NC | NC |
| 3122 | 5145 | CCCTAAAATAACTAAAGGCC | 2 | NC | NC | NC |
| 3123 | 5146 | TCCCTAAAATAACTAAAGGC | 2 | NC | NC | NC |
| 3124 | 5147 | ATCCCTAAAATAACTAAAGG | 2 | NC | NC | NC |
| 3125 | 5148 | TATCCCTAAAATAACTAAAG | 1 | NC | NC | NC |
| 3126 | 5153 | GTTTTTATCCCTAAAATAAC | 2 | NC | NC | NC |
| 3127 | 5158 | CAATAGTTTTTATCCCTAAA | 2 | NC | NC | NC |
| 3128 | 5159 | TCAATAGTTTTTATCCCTAA | 1 | NC | NC | NC |
| 3129 | 5160 | ATCAATAGTTTTTATCCCTA | 2 | NC | NC | NC |
| 3130 | 5161 | TATCAATAGTTTTTATCCCT | 1 | NC | NC | NC |
| 3131 | 5162 | TTATCAATAGTTTTTATCCC | 1 | NC | NC | NC |
| 3132 | 5169 | GTCCTTTTTATCAATAGTTT | 2 | NC | NC | NC |
| 3133 | 5170 | TGTCCTTTTTATCAATAGTT | 2 | NC | NC | NC |
| 3134 | 5171 | TTGTCCTTTTTATCAATAGT | 2 | NC | NC | NC |
| 3135 | 5172 | CTTGTCCTTTTTATCAATAG | 2 | NC | NC | NC |
| 3136 | 5173 | CCTTGTCCTTTTTATCAATA | 2 | NC | NC | NC |
| 3137 | 5174 | TCCTTGTCCTTTTTATCAAT | 2 | NC | NC | NC |
| 3138 | 5175 | ATCCTTGTCCTTTTTATCAA | 2 | NC | NC | NC |
| 3139 | 5176 | TATCCTTGTCCTTTTTATCA | 2 | NC | NC | NC |
| 3140 | 5177 | CTATCCTTGTCCTTTTTATC | 2 | NC | NC | NC |
| 3141 | 5178 | TCTATCCTTGTCCTTTTTAT | 2 | NC | NC | NC |
| 3142 | 5179 | TTCTATCCTTGTCCTTTTTA | 2 | NC | NC | NC |
| 3143 | 5180 | GTTCTATCCTTGTCCTTTTT | 2 | NC | NC | NC |
| 3144 | 5181 | TGTTCTATCCTTGTCCTTTT | 2 | NC | NC | NC |
| 3145 | 5182 | CTGTTCTATCCTTGTCCTTT | 2 | NC | NC | NC |
| 3146 | 5183 | TCTGTTCTATCCTTGTCCTT | 2 | NC | NC | NC |
| 3147 | 5184 | CTCTGTTCTATCCTTGTCCT | 2 | NC | NC | NC |
| 3148 | 5185 | TCTCTGTTCTATCCTTGTCC | 2 | NC | NC | NC |
| 3149 | 5186 | TTCTCTGTTCTATCCTTGTC | 1 | NC | NC | NC |
| 3150 | 5187 | TTTCTCTGTTCTATCCTTGT | 2 | NC | NC | NC |
| 3151 | 5188 | TTTTCTCTGTTCTATCCTTG | 1 | NC | NC | NC |
| 3152 | 5189 | ATTTTCTCTGTTCTATCCTT | 1 | NC | NC | NC |
| 3153 | 5190 | AATTTTCTCTGTTCTATCCT | 1 | NC | NC | NC |
| 3154 | 5191 | AAATTTTCTCTGTTCTATCC | 1 | NC | NC | NC |
| 3155 | 5192 | TAAATTTTCTCTGTTCTATC | 1 | NC | NC | NC |
| 3156 | 5195 | CTTTAAATTTTCTCTGTTCT | 1 | NC | NC | NC |
| 3157 | 5196 | ACTTTAAATTTTCTCTGTTC | 1 | NC | NC | NC |
| 3158 | 5197 | GACTTTAAATTTTCTCTGTT | 1 | NC | NC | NC |
| 3159 | 5198 | GGACTTTAAATTTTCTCTGT | 2 | NC | NC | NC |
| 3160 | 5199 | AGGACTTTAAATTTTCTCTG | 2 | NC | NC | NC |
| 3161 | 5200 | CAGGACTTTAAATTTTCTCT | 2 | NC | NC | NC |
| 3162 | 5201 | ACAGGACTTTAAATTTTCTC | 2 | NC | NC | NC |
| 3163 | 5202 | AACAGGACTTTAAATTTTCT | 1 | NC | NC | NC |
| 3164 | 5203 | GAACAGGACTTTAAATTTTC | 2 | NC | NC | NC |
| 3165 | 5204 | GGAACAGGACTTTAAATTTT | 2 | NC | NC | NC |
| 3166 | 5205 | CGGAACAGGACTTTAAATTT | 2 | NC | NC | NC |
| 3167 | 5206 | CCGGAACAGGACTTTAAATT | 1 | NC | NC | NC |
| 3168 | 5207 | CCCGGAACAGGACTTTAAAT | 1 | NC | NC | NC |
| 3169 | 5208 | ACCCGGAACAGGACTTTAAA | 1 | NC | NC | NC |
| 3170 | 5209 | AACCCGGAACAGGACTTTAA | 2 | NC | NC | NC |
| 3171 | 5210 | AAACCCGGAACAGGACTTTA | 2 | NC | NC | NC |
| 3172 | 5211 | AAAACCCGGAACAGGACTTT | 2 | NC | NC | NC |
| 3173 | 5212 | AAAAACCCGGAACAGGACTT | 2 | NC | NC | NC |
| 3174 | 5239 | CTCTGAGTTTTTAAAGAAAA | 1 | NC | NC | NC |
| 3175 | 5240 | TCTCTGAGTTTTTAAAGAAA | 1 | NC | NC | NC |
| 3176 | 5241 | GTCTCTGAGTTTTTAAAGAA | 2 | NC | NC | NC |
| 3177 | 5242 | AGTCTCTGAGTTTTTAAAGA | 1 | NC | NC | NC |
| 3178 | 5243 | CAGTCTCTGAGTTTTTAAAG | 2 | NC | NC | NC |
| 3179 | 5244 | TCAGTCTCTGAGTTTTTAAA | 2 | NC | NC | NC |
| 3180 | 5254 | ATATTGAACATCAGTCTCTG | 1 | NC | NC | NC |
| 3181 | 5255 | GATATTGAACATCAGTCTCT | 1 | NC | NC | NC |
| 3182 | 5256 | GGATATTGAACATCAGTCTC | 2 | NC | NC | NC |
| 3183 | 5257 | GGGATATTGAACATCAGTCT | 1 | NC | NC | NC |
| 3184 | 5258 | TGGGATATTGAACATCAGTC | 1 | NC | NC | NC |
| 3185 | 5259 | TTGGGATATTGAACATCAGT | 2 | NC | NC | NC |
| 3186 | 5260 | TTTGGGATATTGAACATCAG | 2 | NC | NC | NC |
| 3187 | 5261 | GTTTGGGATATTGAACATCA | 2 | NC | NC | NC |
| 3188 | 5262 | GGTTTGGGATATTGAACATC | 2 | NC | NC | NC |
| 3189 | 5263 | TGGTTTGGGATATTGAACAT | 2 | NC | NC | NC |
| 3190 | 5264 | CTGGTTTGGGATATTGAACA | 2 | NC | NC | NC |
| 3191 | 5265 | ACTGGTTTGGGATATTGAAC | 2 | NC | NC | NC |
| 3192 | 5266 | TACTGGTTTGGGATATTGAA | 2 | NC | NC | NC |
| 3193 | 5267 | TTACTGGTTTGGGATATTGA | 2 | NC | NC | NC |
| 3194 | 5268 | TTTACTGGTTTGGGATATTG | 1 | NC | NC | NC |
| 3195 | 5269 | TTTTACTGGTTTGGGATATT | 2 | NC | NC | NC |
| 3196 | 5270 | ATTTTACTGGTTTGGGATAT | 1 | NC | NC | NC |
| 3197 | 5271 | CATTTTACTGGTTTGGGATA | 1 | NC | NC | NC |
| 3198 | 5272 | CCATTTTACTGGTTTGGGAT | 1 | NC | NC | NC |
| 3199 | 5281 | GTATTTTCACCATTTTACTG | 1 | NC | NC | NC |
| 3200 | 5282 | AGTATTTTCACCATTTTACT | 1 | NC | NC | NC |
| 3201 | 5283 | TAGTATTTTCACCATTTTAC | 1 | NC | NC | NC |
| 3202 | 5285 | CATAGTATTTTCACCATTTT | 1 | NC | NC | NC |
| 3203 | 5286 | TCATAGTATTTTCACCATTT | 1 | NC | NC | NC |
| 3204 | 5287 | CTCATAGTATTTTCACCATT | 2 | NC | NC | NC |
| 3205 | 5288 | GCTCATAGTATTTTCACCAT | 2 | NC | NC | NC |
| 3206 | 5289 | AGCTCATAGTATTTTCACCA | 2 | NC | NC | NC |
| 3207 | 5290 | AAGCTCATAGTATTTTCACC | 2 | NC | NC | NC |
| 3208 | 5291 | CAAGCTCATAGTATTTTCAC | 2 | NC | NC | NC |
| 3209 | 5292 | ACAAGCTCATAGTATTTTCA | 1 | NC | NC | NC |
| 3210 | 5293 | AACAAGCTCATAGTATTTTC | 2 | NC | NC | NC |
| 3211 | 5294 | AAACAAGCTCATAGTATTTT | 2 | NC | NC | NC |
| 3212 | 5295 | AAAACAAGCTCATAGTATTT | 2 | NC | NC | NC |
| 3213 | 5296 | AAAAACAAGCTCATAGTATT | 2 | NC | NC | NC |
| 3214 | 5346 | CTTTCACATAAAGAGATACT | 2 | NC | NC | NC |
| 3215 | 5347 | GCTTTCACATAAAGAGATAC | 2 | NC | NC | NC |
| 3216 | 5348 | TGCTTTCACATAAAGAGATA | 2 | NC | NC | NC |
| 3217 | 5349 | TTGCTTTCACATAAAGAGAT | 2 | NC | NC | NC |
| 3218 | 5350 | ATTGCTTTCACATAAAGAGA | 2 | NC | NC | NC |
| 3219 | 5351 | AATTGCTTTCACATAAAGAG | 2 | NC | NC | NC |
| 3220 | 5352 | CAATTGCTTTCACATAAAGA | 2 | NC | NC | NC |
| 3221 | 5353 | ACAATTGCTTTCACATAAAG | 2 | NC | NC | NC |
| 3222 | 5354 | GACAATTGCTTTCACATAAA | 2 | NC | NC | NC |
| 3223 | 5355 | TGACAATTGCTTTCACATAA | 2 | NC | NC | NC |
| 3224 | 5356 | ATGACAATTGCTTTCACATA | 2 | NC | NC | NC |
| 3225 | 5357 | TATGACAATTGCTTTCACAT | 2 | NC | NC | NC |
| 3226 | 5358 | ATATGACAATTGCTTTCACA | 2 | NC | NC | NC |
| 3227 | 5359 | GATATGACAATTGCTTTCAC | 2 | NC | NC | NC |
| 3228 | 5360 | TGATATGACAATTGCTTTCA | 2 | NC | NC | NC |
| 3229 | 5361 | TTGATATGACAATTGCTTTC | 2 | NC | NC | NC |
| 3230 | 5362 | TTTGATATGACAATTGCTTT | 2 | NC | NC | NC |
| 3231 | 5363 | TTTTGATATGACAATTGCTT | 2 | NC | NC | NC |
| 3232 | 5364 | GTTTTGATATGACAATTGCT | 2 | NC | NC | NC |
| 3233 | 5365 | TGTTTTGATATGACAATTGC | 2 | NC | NC | NC |
| 3234 | 5366 | GTGTTTTGATATGACAATTG | 2 | NC | NC | NC |
| 3235 | 5367 | TGTGTTTTGATATGACAATT | 2 | NC | NC | NC |
| 3236 | 5368 | CTGTGTTTTGATATGACAAT | 2 | NC | NC | NC |
| 3237 | 5369 | GCTGTGTTTTGATATGACAA | 2 | NC | NC | NC |
| 3238 | 5370 | TGCTGTGTTTTGATATGACA | 2 | NC | NC | NC |
| 3239 | 5371 | ATGCTGTGTTTTGATATGAC | 2 | NC | NC | NC |
| 3240 | 5372 | TATGCTGTGTTTTGATATGA | 1 | NC | NC | NC |
| 3241 | 5373 | GTATGCTGTGTTTTGATATG | 2 | NC | NC | NC |
| 3242 | 5374 | TGTATGCTGTGTTTTGATAT | 1 | NC | NC | NC |
| 3243 | 5375 | ATGTATGCTGTGTTTTGATA | 1 | NC | NC | NC |
| 3244 | 5376 | TATGTATGCTGTGTTTTGAT | 1 | NC | NC | NC |
| 3245 | 5377 | GTATGTATGCTGTGTTTTGA | 2 | NC | NC | NC |
| 3246 | 5378 | CGTATGTATGCTGTGTTTTG | 2 | NC | NC | NC |
| 3247 | 5379 | ACGTATGTATGCTGTGTTTT | 2 | NC | NC | NC |
| 3248 | 5380 | AACGTATGTATGCTGTGTTT | 2 | NC | NC | NC |
| 3249 | 5381 | GAACGTATGTATGCTGTGTT | 2 | NC | NC | NC |
| 3250 | 5382 | TGAACGTATGTATGCTGTGT | 2 | NC | NC | NC |
| 3251 | 5383 | TTGAACGTATGTATGCTGTG | 3 | NC | NC | NC |
| 3252 | 5384 | GTTGAACGTATGTATGCTGT | 3 | NC | NC | NC |
| 3253 | 5385 | GGTTGAACGTATGTATGCTG | 3 | NC | NC | NC |
| 3254 | 5386 | AGGTTGAACGTATGTATGCT | 2 | NC | NC | NC |
| 3255 | 5387 | TAGGTTGAACGTATGTATGC | 1 | NC | NC | NC |
| 3256 | 5388 | TTAGGTTGAACGTATGTATG | 2 | NC | NC | NC |
| 3257 | 5389 | GTTAGGTTGAACGTATGTAT | 2 | NC | NC | NC |
| 3258 | 5390 | GGTTAGGTTGAACGTATGTA | 2 | NC | NC | NC |
| 3259 | 5391 | TGGTTAGGTTGAACGTATGT | 2 | NC | NC | NC |
| 3260 | 5392 | TTGGTTAGGTTGAACGTATG | 2 | NC | NC | NC |
| 3261 | 5393 | TTTGGTTAGGTTGAACGTAT | 2 | NC | NC | NC |
| 3262 | 5394 | ATTTGGTTAGGTTGAACGTA | 2 | NC | NC | NC |
| 3263 | 5395 | TATTTGGTTAGGTTGAACGT | 2 | NC | NC | NC |
| 3264 | 5396 | ATATTTGGTTAGGTTGAACG | 3 | NC | NC | NC |
| 3265 | 5397 | GATATTTGGTTAGGTTGAAC | 2 | NC | NC | NC |
| 3266 | 5398 | AGATATTTGGTTAGGTTGAA | 1 | NC | NC | NC |
| 3267 | 5399 | AAGATATTTGGTTAGGTTGA | 1 | NC | NC | NC |
| 3268 | 5400 | AAAGATATTTGGTTAGGTTG | 2 | NC | NC | NC |
| 3269 | 5401 | TAAAGATATTTGGTTAGGTT | 2 | NC | NC | NC |
| 3270 | 5402 | GTAAAGATATTTGGTTAGGT | 2 | NC | NC | NC |
| 3271 | 5403 | TGTAAAGATATTTGGTTAGG | 2 | NC | NC | NC |
| 3272 | 5404 | GTGTAAAGATATTTGGTTAG | 2 | NC | NC | NC |
| 3273 | 5405 | AGTGTAAAGATATTTGGTTA | 2 | NC | NC | NC |
| 3274 | 5406 | AAGTGTAAAGATATTTGGTT | 2 | NC | NC | NC |
| 3275 | 5407 | AAAGTGTAAAGATATTTGGT | 2 | NC | NC | NC |
| 3276 | 5408 | AAAAGTGTAAAGATATTTGG | 2 | NC | NC | NC |
| 3277 | 5414 | GAAAGAAAAAGTGTAAAGAT | 0 | NC | NC | NC |
| 3278 | 5415 | TGAAAGAAAAAGTGTAAAGA | 1 | NC | NC | NC |
| 3279 | 5416 | CTGAAAGAAAAAGTGTAAAG | 1 | NC | NC | NC |
| 3280 | 5417 | CCTGAAAGAAAAAGTGTAAA | 1 | NC | NC | NC |
| 3281 | 5418 | TCCTGAAAGAAAAAGTGTAA | 2 | NC | NC | NC |
| 3282 | 5419 | CTCCTGAAAGAAAAAGTGTA | 2 | NC | NC | NC |
| 3283 | 5420 | TCTCCTGAAAGAAAAAGTGT | 2 | NC | NC | NC |
| 3284 | 5421 | GTCTCCTGAAAGAAAAAGTG | 1 | NC | NC | NC |
| 3285 | 5422 | TGTCTCCTGAAAGAAAAAGT | 2 | NC | NC | NC |
| 3286 | 5423 | TTGTCTCCTGAAAGAAAAAG | 2 | NC | NC | NC |
| 3287 | 5424 | CTTGTCTCCTGAAAGAAAAA | 1 | NC | NC | NC |
| 3288 | 5425 | CCTTGTCTCCTGAAAGAAAA | 1 | NC | NC | NC |
| 3289 | 5426 | CCCTTGTCTCCTGAAAGAAA | 1 | NC | NC | NC |
| 3290 | 5427 | ACCCTTGTCTCCTGAAAGAA | 2 | NC | NC | NC |
| 3291 | 5428 | AACCCTTGTCTCCTGAAAGA | 2 | NC | NC | NC |
| 3292 | 5429 | GAACCCTTGTCTCCTGAAAG | 2 | NC | NC | NC |
| 3293 | 5430 | AGAACCCTTGTCTCCTGAAA | 2 | NC | NC | NC |
| 3294 | 5431 | AAGAACCCTTGTCTCCTGAA | 2 | NC | NC | NC |
| 3295 | 5432 | AAAGAACCCTTGTCTCCTGA | 2 | NC | NC | NC |
| 3296 | 5433 | CAAAGAACCCTTGTCTCCTG | 2 | NC | NC | NC |
| 3297 | 5434 | CCAAAGAACCCTTGTCTCCT | 2 | NC | NC | NC |
| 3298 | 5435 | CCCAAAGAACCCTTGTCTCC | 2 | NC | NC | NC |
| 3299 | 5436 | ACCCAAAGAACCCTTGTCTC | 2 | NC | NC | NC |
| 3300 | 5437 | GACCCAAAGAACCCTTGTCT | 2 | NC | NC | NC |
| 3301 | 5438 | GGACCCAAAGAACCCTTGTC | 2 | NC | NC | NC |
| 3302 | 5444 | TGAAAGGGACCCAAAGAACC | 2 | NC | NC | NC |
| 3303 | 5445 | TTGAAAGGGACCCAAAGAAC | 2 | NC | NC | NC |
| 3304 | 5446 | TTTGAAAGGGACCCAAAGAA | 2 | NC | NC | NC |
| 3305 | 5447 | GTTTGAAAGGGACCCAAAGA | 2 | NC | NC | NC |
| 3306 | 5448 | CGTTTGAAAGGGACCCAAAG | 2 | NC | NC | NC |
| 3307 | 5457 | CCAAGATACCGTTTGAAAGG | 3 | NC | NC | NC |
| 3308 | 5458 | ACCAAGATACCGTTTGAAAG | 3 | NC | NC | NC |
| 3309 | 5459 | CACCAAGATACCGTTTGAAA | 2 | NC | NC | NC |
| 3310 | 5460 | ACACCAAGATACCGTTTGAA | 2 | NC | NC | NC |
| 3311 | 5461 | AACACCAAGATACCGTTTGA | 2 | NC | NC | NC |
| 3312 | 5462 | TAACACCAAGATACCGTTTG | 3 | NC | NC | NC |
| 3313 | 5463 | ATAACACCAAGATACCGTTT | 2 | NC | NC | NC |
| 3314 | 5464 | AATAACACCAAGATACCGTT | 2 | NC | NC | NC |
| 3315 | 5465 | TAATAACACCAAGATACCGT | 2 | NC | NC | NC |
| 3316 | 5466 | GTAATAACACCAAGATACCG | 2 | NC | NC | NC |
| 3317 | 5467 | TGTAATAACACCAAGATACC | 2 | NC | NC | NC |
| 3318 | 5468 | ATGTAATAACACCAAGATAC | 2 | NC | NC | NC |
| 3319 | 5469 | AATGTAATAACACCAAGATA | 1 | NC | NC | NC |
| 3320 | 5470 | TAATGTAATAACACCAAGAT | 2 | NC | NC | NC |
| 3321 | 5471 | ATAATGTAATAACACCAAGA | 2 | NC | NC | NC |
| 3322 | 5472 | CATAATGTAATAACACCAAG | 2 | NC | NC | NC |
| 3323 | 5473 | GCATAATGTAATAACACCAA | 2 | NC | NC | NC |
| 3324 | 5474 | GGCATAATGTAATAACACCA | 2 | NC | NC | NC |
| 3325 | 5475 | AGGCATAATGTAATAACACC | 2 | NC | NC | NC |
| 3326 | 5476 | TAGGCATAATGTAATAACAC | 2 | NC | NC | NC |
| 3327 | 5478 | GATAGGCATAATGTAATAAC | 2 | NC | NC | NC |
| 3328 | 5479 | AGATAGGCATAATGTAATAA | 2 | NC | NC | NC |
| 3329 | 5480 | TAGATAGGCATAATGTAATA | 1 | NC | NC | NC |
| 3330 | 5481 | ATAGATAGGCATAATGTAAT | 1 | NC | NC | NC |
| 3331 | 5482 | AATAGATAGGCATAATGTAA | 2 | NC | NC | NC |
| 3332 | 5483 | CAATAGATAGGCATAATGTA | 2 | NC | NC | NC |
| 3333 | 5484 | GCAATAGATAGGCATAATGT | 2 | NC | NC | NC |
| 3334 | 5485 | GGCAATAGATAGGCATAATG | 2 | NC | NC | NC |
| 3335 | 5486 | GGGCAATAGATAGGCATAAT | 2 | NC | NC | NC |
| 3336 | 5487 | AGGGCAATAGATAGGCATAA | 2 | NC | NC | NC |
| 3337 | 5488 | AAGGGCAATAGATAGGCATA | 2 | NC | NC | NC |
| 3338 | 5489 | TAAGGGCAATAGATAGGCAT | 2 | NC | NC | NC |
| 3339 | 5490 | ATAAGGGCAATAGATAGGCA | 2 | NC | NC | NC |
| 3340 | 5491 | TATAAGGGCAATAGATAGGC | 2 | NC | NC | NC |
| 3341 | 5492 | TTATAAGGGCAATAGATAGG | 2 | NC | NC | NC |
| 3342 | 5493 | ATTATAAGGGCAATAGATAG | 2 | NC | NC | NC |
| 3343 | 5494 | TATTATAAGGGCAATAGATA | 2 | NC | NC | NC |
| 3344 | 5495 | ATATTATAAGGGCAATAGAT | 2 | NC | NC | NC |
| 3345 | 5496 | GATATTATAAGGGCAATAGA | 2 | NC | NC | NC |
| 3346 | 5497 | TGATATTATAAGGGCAATAG | 2 | NC | NC | NC |
| 3347 | 5498 | GTGATATTATAAGGGCAATA | 2 | NC | NC | NC |
| 3348 | 5499 | AGTGATATTATAAGGGCAAT | 2 | NC | NC | NC |
| 3349 | 5500 | AAGTGATATTATAAGGGCAA | 2 | NC | NC | NC |
| 3350 | 5501 | CAAGTGATATTATAAGGGCA | 2 | NC | NC | NC |
| 3351 | 5502 | CCAAGTGATATTATAAGGGC | 2 | NC | NC | NC |
| 3352 | 5503 | CCCAAGTGATATTATAAGGG | 3 | NC | NC | NC |
| 3353 | 5504 | TCCCAAGTGATATTATAAGG | 1 | NC | NC | NC |
| 3354 | 5505 | GTCCCAAGTGATATTATAAG | 2 | NC | NC | NC |
| 3355 | 5506 | GGTCCCAAGTGATATTATAA | 2 | NC | NC | NC |
| 3356 | 5507 | TGGTCCCAAGTGATATTATA | 2 | NC | NC | NC |
| 3357 | 5508 | CTGGTCCCAAGTGATATTAT | 2 | NC | NC | NC |
| 3358 | 5509 | CCTGGTCCCAAGTGATATTA | 2 | NC | NC | NC |
| 3359 | 5510 | TCCTGGTCCCAAGTGATATT | 1 | NC | NC | NC |
| 3360 | 5511 | GTCCTGGTCCCAAGTGATAT | 2 | NC | NC | NC |
| 3361 | 5512 | AGTCCTGGTCCCAAGTGATA | 2 | NC | NC | NC |
| 3362 | 5513 | CAGTCCTGGTCCCAAGTGAT | 1 | NC | NC | NC |
| 3363 | 5514 | TCAGTCCTGGTCCCAAGTGA | 1 | NC | NC | NC |
| 3364 | 5515 | ATCAGTCCTGGTCCCAAGTG | 2 | NC | NC | NC |
| 3365 | 5516 | GATCAGTCCTGGTCCCAAGT | 1 | NC | NC | NC |
| 3366 | 5518 | ACGATCAGTCCTGGTCCCAA | 2 | NC | NC | NC |
| 3367 | 5519 | AACGATCAGTCCTGGTCCCA | 3 | NC | NC | NC |
| 3368 | 5521 | AGAACGATCAGTCCTGGTCC | 2 | NC | NC | NC |
| 3369 | 5522 | CAGAACGATCAGTCCTGGTC | 3 | NC | NC | NC |
| 3370 | 5523 | GCAGAACGATCAGTCCTGGT | 3 | NC | NC | NC |
| 3371 | 5524 | TGCAGAACGATCAGTCCTGG | 3 | NC | NC | NC |
| 3372 | 5525 | TTGCAGAACGATCAGTCCTG | 3 | NC | NC | NC |
| 3373 | 5526 | TTTGCAGAACGATCAGTCCT | 3 | NC | NC | NC |
| 3374 | 5527 | ATTTGCAGAACGATCAGTCC | 2 | NC | NC | NC |
| 3375 | 5528 | CATTTGCAGAACGATCAGTC | 2 | NC | NC | NC |
| 3376 | 5541 | ATGGCATAACAAGCATTTGC | 2 | NC | NC | NC |
| 3377 | 5543 | GAATGGCATAACAAGCATTT | 2 | NC | NC | NC |
| 3378 | 5544 | AGAATGGCATAACAAGCATT | 2 | NC | NC | NC |
| 3379 | 5545 | GAGAATGGCATAACAAGCAT | 2 | NC | NC | NC |
| 3380 | 5546 | TGAGAATGGCATAACAAGCA | 1 | NC | NC | NC |
| 3381 | 5547 | TTGAGAATGGCATAACAAGC | 1 | NC | NC | NC |
| 3382 | 5548 | ATTGAGAATGGCATAACAAG | 1 | NC | NC | NC |
| 3383 | 5549 | GATTGAGAATGGCATAACAA | 2 | NC | NC | NC |
| 3384 | 5550 | AGATTGAGAATGGCATAACA | 2 | NC | NC | NC |
| 3385 | 5551 | TAGATTGAGAATGGCATAAC | 2 | NC | NC | NC |
| 3386 | 5552 | ATAGATTGAGAATGGCATAA | 2 | NC | NC | NC |
| 3387 | 5553 | AATAGATTGAGAATGGCATA | 2 | NC | NC | NC |
| 3388 | 5554 | AAATAGATTGAGAATGGCAT | 2 | NC | NC | NC |
| 3389 | 5555 | AAAATAGATTGAGAATGGCA | 2 | NC | NC | NC |
| 3390 | 5556 | AAAAATAGATTGAGAATGGC | 2 | NC | NC | NC |
| 3391 | 5557 | GAAAAATAGATTGAGAATGG | 2 | NC | NC | NC |
| 3392 | 5558 | GGAAAAATAGATTGAGAATG | 1 | NC | NC | NC |
| 3393 | 5559 | GGGAAAAATAGATTGAGAAT | 1 | NC | NC | NC |
| 3394 | 5560 | CGGGAAAAATAGATTGAGAA | 2 | NC | NC | NC |
| 3395 | 5561 | GCGGGAAAAATAGATTGAGA | 2 | NC | NC | NC |
| 3396 | 5562 | TGCGGGAAAAATAGATTGAG | 3 | NC | NC | NC |
| 3397 | 5563 | GTGCGGGAAAAATAGATTGA | 2 | NC | NC | NC |
| 3398 | 5564 | GGTGCGGGAAAAATAGATTG | 2 | NC | NC | NC |
| 3399 | 5565 | AGGTGCGGGAAAAATAGATT | 2 | NC | NC | NC |
| 3400 | 5566 | AAGGTGCGGGAAAAATAGAT | 2 | NC | NC | NC |
| 3401 | 5567 | AAAGGTGCGGGAAAAATAGA | 2 | NC | NC | NC |
| 3402 | 5568 | AAAAGGTGCGGGAAAAATAG | 2 | NC | NC | NC |
| 3403 | 5569 | GAAAAGGTGCGGGAAAAATA | 2 | NC | NC | NC |
| 3404 | 5570 | TGAAAAGGTGCGGGAAAAAT | 2 | NC | NC | NC |
| 3405 | 5571 | GTGAAAAGGTGCGGGAAAAA | 2 | NC | NC | NC |
| 3406 | 5572 | TGTGAAAAGGTGCGGGAAAA | 2 | NC | NC | NC |
| 3407 | 5573 | ATGTGAAAAGGTGCGGGAAA | 2 | NC | NC | NC |
| 3408 | 5574 | CATGTGAAAAGGTGCGGGAA | 2 | NC | NC | NC |
| 3409 | 5575 | TCATGTGAAAAGGTGCGGGA | 3 | NC | NC | NC |
| 3410 | 5576 | ATCATGTGAAAAGGTGCGGG | 3 | NC | NC | NC |
| 3411 | 5577 | AATCATGTGAAAAGGTGCGG | 3 | NC | NC | NC |
| 3412 | 5578 | AAATCATGTGAAAAGGTGCG | 2 | NC | NC | NC |
| 3413 | 5579 | CAAATCATGTGAAAAGGTGC | 2 | NC | NC | NC |
| 3414 | 5590 | CCTATTAACCACAAATCATG | 2 | NC | NC | NC |
| 3415 | 5591 | TCCTATTAACCACAAATCAT | 2 | NC | NC | NC |
| 3416 | 5592 | GTCCTATTAACCACAAATCA | 2 | NC | NC | NC |
| 3417 | 5593 | AGTCCTATTAACCACAAATC | 3 | NC | NC | NC |
| 3418 | 5594 | GAGTCCTATTAACCACAAAT | 3 | NC | NC | NC |
| 3419 | 5595 | TGAGTCCTATTAACCACAAA | 2 | NC | NC | NC |
| 3420 | 5596 | TTGAGTCCTATTAACCACAA | 2 | NC | NC | NC |
| 3421 | 5597 | GTTGAGTCCTATTAACCACA | 2 | NC | NC | NC |
| 3422 | 5598 | TGTTGAGTCCTATTAACCAC | 2 | NC | NC | NC |
| 3423 | 5599 | CTGTTGAGTCCTATTAACCA | 2 | NC | NC | NC |
| 3424 | 5600 | TCTGTTGAGTCCTATTAACC | 2 | NC | NC | NC |
| 3425 | 5601 | GTCTGTTGAGTCCTATTAAC | 2 | NC | NC | NC |
| 3426 | 5602 | AGTCTGTTGAGTCCTATTAA | 2 | NC | NC | NC |
| 3427 | 5603 | TAGTCTGTTGAGTCCTATTA | 2 | NC | NC | NC |
| 3428 | 5604 | TTAGTCTGTTGAGTCCTATT | 2 | NC | NC | NC |
| 3429 | 5605 | TTTAGTCTGTTGAGTCCTAT | 3 | NC | NC | NC |
| 3430 | 5606 | TTTTAGTCTGTTGAGTCCTA | 2 | NC | NC | NC |
| 3431 | 5607 | ATTTTAGTCTGTTGAGTCCT | 2 | NC | NC | NC |
| 3432 | 5608 | AATTTTAGTCTGTTGAGTCC | 2 | NC | NC | NC |
| 3433 | 5609 | CAATTTTAGTCTGTTGAGTC | 2 | NC | NC | NC |
| 3434 | 5610 | GCAATTTTAGTCTGTTGAGT | 2 | NC | NC | NC |
| 3435 | 5611 | TGCAATTTTAGTCTGTTGAG | 2 | NC | NC | NC |
| 3436 | 5612 | ATGCAATTTTAGTCTGTTGA | 2 | NC | NC | NC |
| 3437 | 5613 | TATGCAATTTTAGTCTGTTG | 2 | NC | NC | NC |
| 3438 | 5614 | CTATGCAATTTTAGTCTGTT | 2 | NC | NC | NC |
| 3439 | 5615 | ACTATGCAATTTTAGTCTGT | 2 | NC | NC | NC |
| 3440 | 5616 | TACTATGCAATTTTAGTCTG | 2 | NC | NC | NC |
| 3441 | 5617 | CTACTATGCAATTTTAGTCT | 2 | NC | NC | NC |
| 3442 | 5618 | TCTACTATGCAATTTTAGTC | 2 | NC | NC | NC |
| 3443 | 5619 | TTCTACTATGCAATTTTAGT | 2 | NC | NC | NC |
| 3444 | 5620 | TTTCTACTATGCAATTTTAG | 2 | NC | NC | NC |
| 3445 | 5655 | GCAATAAACATTACCAGCTG | 2 | NC | NC | NC |
| 3446 | 5656 | TGCAATAAACATTACCAGCT | 2 | NC | NC | NC |
| 3447 | 5657 | TTGCAATAAACATTACCAGC | 2 | NC | NC | NC |
| 3448 | 5658 | GTTGCAATAAACATTACCAG | 2 | NC | NC | NC |
| 3449 | 5659 | AGTTGCAATAAACATTACCA | 2 | NC | NC | NC |
| 3450 | 5660 | CAGTTGCAATAAACATTACC | 2 | NC | NC | NC |
| 3451 | 5661 | CCAGTTGCAATAAACATTAC | 2 | NC | NC | NC |
| 3452 | 5662 | CCCAGTTGCAATAAACATTA | 2 | NC | NC | NC |
| 3453 | 5663 | CCCCAGTTGCAATAAACATT | 2 | NC | NC | NC |
| 3454 | 5664 | ACCCCAGTTGCAATAAACAT | 2 | NC | NC | NC |
| 3455 | 5665 | CACCCCAGTTGCAATAAACA | 2 | NC | NC | NC |
| 3456 | 5666 | GCACCCCAGTTGCAATAAAC | 2 | NC | NC | NC |
| 3457 | 5667 | AGCACCCCAGTTGCAATAAA | 2 | NC | NC | NC |
| 3458 | 5668 | TAGCACCCCAGTTGCAATAA | 2 | NC | NC | NC |
| 3459 | 5669 | ATAGCACCCCAGTTGCAATA | 2 | NC | NC | NC |
| 3460 | 5670 | TATAGCACCCCAGTTGCAAT | 2 | NC | NC | NC |
| 3461 | 5671 | GTATAGCACCCCAGTTGCAA | 3 | NC | NC | NC |
| 3462 | 5672 | TGTATAGCACCCCAGTTGCA | 2 | NC | NC | NC |
| 3463 | 5673 | TTGTATAGCACCCCAGTTGC | 3 | NC | NC | NC |
| 3464 | 5674 | ATTGTATAGCACCCCAGTTG | 2 | NC | NC | NC |
| 3465 | 5675 | AATTGTATAGCACCCCAGTT | 2 | NC | NC | NC |
| 3466 | 5676 | TAATTGTATAGCACCCCAGT | 2 | NC | NC | NC |
| 3467 | 5677 | CTAATTGTATAGCACCCCAG | 2 | NC | NC | NC |
| 3468 | 5678 | ACTAATTGTATAGCACCCCA | 3 | NC | NC | NC |
| 3469 | 5679 | TACTAATTGTATAGCACCCC | 2 | NC | NC | NC |
| 3470 | 5680 | TTACTAATTGTATAGCACCC | 2 | NC | NC | NC |
| 3471 | 5681 | CTTACTAATTGTATAGCACC | 2 | NC | NC | NC |
| 3472 | 5682 | TCTTACTAATTGTATAGCAC | 2 | NC | NC | NC |
| 3473 | 5683 | ATCTTACTAATTGTATAGCA | 2 | NC | NC | NC |
| 3474 | 5684 | CATCTTACTAATTGTATAGC | 2 | NC | NC | NC |
| 3475 | 5685 | TCATCTTACTAATTGTATAG | 2 | NC | NC | NC |
| 3476 | 5687 | CATCATCTTACTAATTGTAT | 1 | NC | NC | NC |
| 3477 | 5688 | GCATCATCTTACTAATTGTA | 2 | NC | NC | NC |
| 3478 | 5689 | TGCATCATCTTACTAATTGT | 2 | NC | NC | NC |
| 3479 | 5690 | TTGCATCATCTTACTAATTG | 2 | NC | NC | NC |
| 3480 | 5691 | ATTGCATCATCTTACTAATT | 2 | NC | NC | NC |
| 3481 | 5692 | CATTGCATCATCTTACTAAT | 2 | NC | NC | NC |
| 3482 | 5693 | TCATTGCATCATCTTACTAA | 2 | NC | NC | NC |
| 3483 | 5694 | CTCATTGCATCATCTTACTA | 2 | NC | NC | NC |
| 3484 | 5695 | TCTCATTGCATCATCTTACT | 1 | NC | NC | NC |
| 3485 | 5696 | TTCTCATTGCATCATCTTAC | 2 | NC | NC | NC |
| 3486 | 5697 | ATTCTCATTGCATCATCTTA | 2 | NC | NC | NC |
| 3487 | 5698 | AATTCTCATTGCATCATCTT | 1 | NC | NC | NC |
| 3488 | 5699 | AAATTCTCATTGCATCATCT | 2 | NC | NC | NC |
| 3489 | 5700 | GAAATTCTCATTGCATCATC | 2 | NC | NC | NC |
| 3490 | 5701 | AGAAATTCTCATTGCATCAT | 2 | NC | NC | NC |
| 3491 | 5702 | TAGAAATTCTCATTGCATCA | 1 | NC | NC | NC |
| 3492 | 5703 | GTAGAAATTCTCATTGCATC | 1 | NC | NC | NC |
| 3493 | 5704 | AGTAGAAATTCTCATTGCAT | 1 | NC | NC | NC |
| 3494 | 5705 | AAGTAGAAATTCTCATTGCA | 2 | NC | NC | NC |
| 3495 | 5706 | AAAGTAGAAATTCTCATTGC | 2 | NC | NC | NC |
| 3496 | 5707 | AAAAGTAGAAATTCTCATTG | 1 | NC | NC | NC |
| 3497 | 5708 | CAAAAGTAGAAATTCTCATT | 2 | NC | NC | NC |
| 3498 | 5709 | ACAAAAGTAGAAATTCTCAT | 2 | NC | NC | NC |
| 3499 | 5710 | TACAAAAGTAGAAATTCTCA | 2 | NC | NC | NC |
| 3500 | 5711 | ATACAAAAGTAGAAATTCTC | 2 | NC | NC | NC |
| 3501 | 5715 | GGAAATACAAAAGTAGAAAT | 1 | NC | NC | NC |
| 3502 | 5716 | AGGAAATACAAAAGTAGAAA | 1 | NC | NC | NC |
| 3503 | 5717 | CAGGAAATACAAAAGTAGAA | 1 | NC | NC | NC |
| 3504 | 5718 | TCAGGAAATACAAAAGTAGA | 1 | NC | NC | NC |
| 3505 | 5719 | GTCAGGAAATACAAAAGTAG | 1 | NC | NC | NC |
| 3506 | 5720 | GGTCAGGAAATACAAAAGTA | 2 | NC | NC | NC |
| 3507 | 5721 | TGGTCAGGAAATACAAAAGT | 2 | NC | NC | NC |
| 3508 | 5722 | CTGGTCAGGAAATACAAAAG | 2 | NC | NC | NC |
| 3509 | 5723 | GCTGGTCAGGAAATACAAAA | 1 | NC | NC | NC |
| 3510 | 5724 | GGCTGGTCAGGAAATACAAA | 1 | NC | NC | NC |
| 3511 | 5725 | AGGCTGGTCAGGAAATACAA | 2 | NC | NC | NC |
| 3512 | 5726 | CAGGCTGGTCAGGAAATACA | 2 | NC | NC | NC |
| 3513 | 5727 | GCAGGCTGGTCAGGAAATAC | 2 | NC | NC | NC |
| 3514 | 5728 | AGCAGGCTGGTCAGGAAATA | 2 | NC | NC | NC |
| 3515 | 5742 | TAAAAGCCACTTTGAGCAGG | 2 | NC | NC | NC |
| 3516 | 5743 | ATAAAAGCCACTTTGAGCAG | 2 | NC | NC | NC |
| 3517 | 5744 | TATAAAAGCCACTTTGAGCA | 2 | NC | NC | NC |
| 3518 | 5745 | ATATAAAAGCCACTTTGAGC | 2 | NC | NC | NC |
| 3519 | 5746 | GATATAAAAGCCACTTTGAG | 2 | NC | NC | NC |
| 3520 | 5747 | TGATATAAAAGCCACTTTGA | 2 | NC | NC | NC |
| 3521 | 5748 | TTGATATAAAAGCCACTTTG | 2 | NC | NC | NC |
| 3522 | 5749 | ATTGATATAAAAGCCACTTT | 2 | NC | NC | NC |
| 3523 | 5750 | AATTGATATAAAAGCCACTT | 2 | NC | NC | NC |
| 3524 | 5751 | CAATTGATATAAAAGCCACT | 2 | NC | NC | NC |
| 3525 | 5752 | TCAATTGATATAAAAGCCAC | 2 | NC | NC | NC |
| 3526 | 5753 | TTCAATTGATATAAAAGCCA | 2 | NC | NC | NC |
| 3527 | 5754 | ATTCAATTGATATAAAAGCC | 2 | NC | NC | NC |
| 3528 | 5755 | CATTCAATTGATATAAAAGC | 2 | NC | NC | NC |
| 3529 | 5762 | GGAAAATCATTCAATTGATA | 1 | NC | NC | NC |
| 3530 | 5763 | AGGAAAATCATTCAATTGAT | 1 | NC | NC | NC |
| 3531 | 5764 | GAGGAAAATCATTCAATTGA | 1 | NC | NC | NC |
| 3532 | 5765 | TGAGGAAAATCATTCAATTG | 2 | NC | NC | NC |
| 3533 | 5766 | ATGAGGAAAATCATTCAATT | 1 | NC | NC | NC |
| 3534 | 5786 | TTGGTTTCCTGTATTAAAAA | 2 | NC | NC | NC |
| 3535 | 5787 | ATTGGTTTCCTGTATTAAAA | 1 | NC | NC | NC |
| 3536 | 5788 | AATTGGTTTCCTGTATTAAA | 2 | NC | NC | NC |
| 3537 | 5789 | GAATTGGTTTCCTGTATTAA | 2 | NC | NC | NC |
| 3538 | 5790 | CGAATTGGTTTCCTGTATTA | 3 | NC | NC | NC |
| 3539 | 5791 | ACGAATTGGTTTCCTGTATT | 2 | NC | NC | NC |
| 3540 | 5792 | CACGAATTGGTTTCCTGTAT | 1 | NC | NC | NC |
| 3541 | 5793 | GCACGAATTGGTTTCCTGTA | 2 | NC | NC | NC |
| 3542 | 5794 | AGCACGAATTGGTTTCCTGT | 3 | NC | NC | NC |
| 3543 | 5795 | GAGCACGAATTGGTTTCCTG | 2 | NC | NC | NC |
| 3544 | 5796 | TGAGCACGAATTGGTTTCCT | 2 | NC | NC | NC |
| 3545 | 5797 | ATGAGCACGAATTGGTTTCC | 2 | NC | NC | NC |
| 3546 | 5798 | CATGAGCACGAATTGGTTTC | 3 | NC | NC | NC |
| 3547 | 5799 | CCATGAGCACGAATTGGTTT | 2 | NC | NC | NC |
| 3548 | 5800 | TCCATGAGCACGAATTGGTT | 2 | NC | NC | NC |
| 3549 | 5802 | CTTCCATGAGCACGAATTGG | 3 | NC | NC | NC |
| 3550 | 5803 | TCTTCCATGAGCACGAATTG | 3 | NC | NC | NC |
| 3551 | 5804 | TTCTTCCATGAGCACGAATT | 2 | NC | NC | NC |
| 3552 | 5805 | TTTCTTCCATGAGCACGAAT | 2 | NC | NC | NC |
| 3553 | 5806 | TTTTCTTCCATGAGCACGAA | 2 | NC | NC | NC |
| 3554 | 5807 | CTTTTCTTCCATGAGCACGA | 2 | NC | NC | NC |
| 3555 | 5808 | ACTTTTCTTCCATGAGCACG | 2 | NC | NC | NC |
| 3556 | 5809 | AACTTTTCTTCCATGAGCAC | 2 | NC | NC | NC |
| 3557 | 5810 | GAACTTTTCTTCCATGAGCA | 2 | NC | NC | NC |
| 3558 | 5835 | ATTCACTTCAAGGCTGCTGG | 2 | NC | NC | NC |
| 3559 | 5836 | GATTCACTTCAAGGCTGCTG | 2 | NC | NC | NC |
| 3560 | 5837 | AGATTCACTTCAAGGCTGCT | 2 | NC | NC | NC |
| 3561 | 5838 | AAGATTCACTTCAAGGCTGC | 2 | NC | NC | NC |
| 3562 | 5848 | TTGCTCCTGTAAGATTCACT | 2 | NC | NC | NC |
| 3563 | 5849 | ATTGCTCCTGTAAGATTCAC | 2 | NC | NC | NC |
| 3564 | 5850 | CATTGCTCCTGTAAGATTCA | 3 | NC | NC | NC |
| 3565 | 5851 | TCATTGCTCCTGTAAGATTC | 2 | NC | NC | NC |
| 3566 | 5852 | TTCATTGCTCCTGTAAGATT | 1 | NC | NC | NC |
| 3567 | 5853 | TTTCATTGCTCCTGTAAGAT | 1 | NC | NC | NC |
| 3568 | 5854 | CTTTCATTGCTCCTGTAAGA | 2 | NC | NC | NC |
| 3569 | 5855 | ACTTTCATTGCTCCTGTAAG | 2 | NC | NC | NC |
| 3570 | 5856 | TACTTTCATTGCTCCTGTAA | 2 | NC | NC | NC |
| 3571 | 5857 | ATACTTTCATTGCTCCTGTA | 2 | NC | NC | NC |
| 3572 | 5858 | AATACTTTCATTGCTCCTGT | 2 | NC | NC | NC |
| 3573 | 5859 | CAATACTTTCATTGCTCCTG | 2 | NC | NC | NC |
| 3574 | 5865 | TGAATGCAATACTTTCATTG | 2 | NC | NC | NC |
| 3575 | 5869 | CTAATGAATGCAATACTTTC | 0 | NC | NC | NC |
| 3576 | 5870 | GCTAATGAATGCAATACTTT | 1 | NC | NC | NC |
| 3577 | 5871 | CGCTAATGAATGCAATACTT | 1 | NC | NC | NC |
| 3578 | 5872 | ACGCTAATGAATGCAATACT | 1 | NC | NC | NC |
| 3579 | 5873 | GACGCTAATGAATGCAATAC | 2 | NC | NC | NC |
| 3580 | 5874 | AGACGCTAATGAATGCAATA | 2 | NC | NC | NC |
| 3581 | 5875 | CAGACGCTAATGAATGCAAT | 2 | NC | NC | NC |
| 3582 | 5876 | GCAGACGCTAATGAATGCAA | 2 | NC | NC | NC |
| 3583 | 5896 | TTCTCTGAACCTTCTCTGGG | 1 | NC | NC | NC |
| 3584 | 5897 | TTTCTCTGAACCTTCTCTGG | 1 | NC | NC | NC |
| 3585 | 5898 | TTTTCTCTGAACCTTCTCTG | 1 | NC | NC | NC |
| 3586 | 5899 | GTTTTCTCTGAACCTTCTCT | 1 | NC | NC | NC |
| 3587 | 5906 | AGTGAAGGTTTTCTCTGAAC | 2 | NC | NC | NC |
| 3588 | 5907 | AAGTGAAGGTTTTCTCTGAA | 1 | NC | NC | NC |
| 3589 | 5908 | CAAGTGAAGGTTTTCTCTGA | 1 | NC | NC | NC |
| 3590 | 5909 | ACAAGTGAAGGTTTTCTCTG | 1 | NC | NC | NC |
| 3591 | 5910 | AACAAGTGAAGGTTTTCTCT | 2 | NC | NC | NC |
| 3592 | 5911 | AAACAAGTGAAGGTTTTCTC | 2 | NC | NC | NC |
| 3593 | 5916 | CTTGAAAACAAGTGAAGGTT | 2 | NC | NC | NC |
| 3594 | 5917 | CCTTGAAAACAAGTGAAGGT | 2 | NC | NC | NC |
| 3595 | 5918 | CCCTTGAAAACAAGTGAAGG | 2 | NC | NC | NC |
| 3596 | 5919 | CCCCTTGAAAACAAGTGAAG | 2 | NC | NC | NC |
| 3597 | 5920 | TCCCCTTGAAAACAAGTGAA | 2 | NC | NC | NC |
| 3598 | 5921 | ATCCCCTTGAAAACAAGTGA | 2 | NC | NC | NC |
| 3599 | 5922 | GATCCCCTTGAAAACAAGTG | 2 | NC | NC | NC |
| 3600 | 5923 | GGATCCCCTTGAAAACAAGT | 2 | NC | NC | NC |
| 3601 | 5935 | GTAAATCTACAAGGATCCCC | 3 | NC | NC | NC |
| 3602 | 5936 | CGTAAATCTACAAGGATCCC | 2 | NC | NC | NC |
| 3603 | 5937 | ACGTAAATCTACAAGGATCC | 2 | NC | NC | NC |
| 3604 | 5938 | TACGTAAATCTACAAGGATC | 2 | NC | NC | NC |
| 3605 | 5939 | TTACGTAAATCTACAAGGAT | 2 | NC | NC | NC |
| 3606 | 5940 | ATTACGTAAATCTACAAGGA | 2 | NC | NC | NC |
| 3607 | 5941 | AATTACGTAAATCTACAAGG | 2 | NC | NC | NC |
| 3608 | 5942 | CAATTACGTAAATCTACAAG | 2 | NC | NC | NC |
| 3609 | 5943 | CCAATTACGTAAATCTACAA | 2 | NC | NC | NC |
| 3610 | 5944 | TCCAATTACGTAAATCTACA | 2 | NC | NC | NC |
| 3611 | 5945 | TTCCAATTACGTAAATCTAC | 2 | NC | NC | NC |
| 3612 | 5946 | ATTCCAATTACGTAAATCTA | 2 | NC | NC | NC |
| 3613 | 5947 | GATTCCAATTACGTAAATCT | 2 | NC | NC | NC |
| 3614 | 5948 | GGATTCCAATTACGTAAATC | 1 | NC | NC | NC |
| 3615 | 5949 | AGGATTCCAATTACGTAAAT | 1 | NC | NC | NC |
| 3616 | 5950 | CAGGATTCCAATTACGTAAA | 2 | NC | NC | NC |
| 3617 | 5951 | TCAGGATTCCAATTACGTAA | 2 | NC | NC | NC |
| 3618 | 5952 | TTCAGGATTCCAATTACGTA | 2 | NC | NC | NC |
| 3619 | 5953 | CTTCAGGATTCCAATTACGT | 2 | NC | NC | NC |
| 3620 | 5954 | TCTTCAGGATTCCAATTACG | 1 | NC | NC | NC |
| 3621 | 5955 | TTCTTCAGGATTCCAATTAC | 0 | NC | NC | NC |
| 3622 | 5956 | GTTCTTCAGGATTCCAATTA | 0 | NC | NC | NC |
| 3623 | 5957 | TGTTCTTCAGGATTCCAATT | 1 | NC | NC | NC |
| 3624 | 5993 | TAGAAGAATAAAAGCCATTT | 2 | NC | NC | NC |
| 3625 | 5994 | TTAGAAGAATAAAAGCCATT | 1 | NC | NC | NC |
| 3626 | 5995 | TTTAGAAGAATAAAAGCCAT | 1 | NC | NC | NC |
| 3627 | 5996 | ATTTAGAAGAATAAAAGCCA | 1 | NC | NC | NC |
| 3628 | 5997 | TATTTAGAAGAATAAAAGCC | 1 | NC | NC | NC |
| 3629 | 5998 | GTATTTAGAAGAATAAAAGC | 2 | NC | NC | NC |
| 3630 | 6007 | CGTTTATATGTATTTAGAAG | 2 | NC | NC | NC |
| 3631 | 6008 | CCGTTTATATGTATTTAGAA | 2 | NC | NC | NC |
| 3632 | 6009 | TCCGTTTATATGTATTTAGA | 2 | NC | NC | NC |
| 3633 | 6010 | ATCCGTTTATATGTATTTAG | 2 | NC | NC | NC |
| 3634 | 6011 | CATCCGTTTATATGTATTTA | 2 | NC | NC | NC |
| 3635 | 6012 | ACATCCGTTTATATGTATTT | 2 | NC | NC | NC |
| 3636 | 6013 | AACATCCGTTTATATGTATT | 2 | NC | NC | NC |
| 3637 | 6023 | CCATCTATAAAACATCCGTT | 2 | NC | NC | NC |
| 3638 | 6024 | CCCATCTATAAAACATCCGT | 2 | NC | NC | NC |
| 3639 | 6025 | TCCCATCTATAAAACATCCG | 3 | NC | NC | NC |
| 3640 | 6026 | TTCCCATCTATAAAACATCC | 2 | NC | NC | NC |
| 3641 | 6027 | CTTCCCATCTATAAAACATC | 2 | NC | NC | NC |
| 3642 | 6028 | TCTTCCCATCTATAAAACAT | 1 | NC | NC | NC |
| 3643 | 6029 | GTCTTCCCATCTATAAAACA | 1 | NC | NC | NC |
| 3644 | 6030 | TGTCTTCCCATCTATAAAAC | 1 | NC | NC | NC |
| 3645 | 6031 | ATGTCTTCCCATCTATAAAA | 1 | NC | NC | NC |
| 3646 | 6032 | CATGTCTTCCCATCTATAAA | 1 | NC | NC | NC |
| 3647 | 6033 | TCATGTCTTCCCATCTATAA | 2 | NC | NC | NC |
| 3648 | 6034 | GTCATGTCTTCCCATCTATA | 2 | NC | NC | NC |
| 3649 | 6035 | GGTCATGTCTTCCCATCTAT | 1 | NC | NC | NC |
| 3650 | 6036 | AGGTCATGTCTTCCCATCTA | 1 | NC | NC | NC |
| 3651 | 6037 | AAGGTCATGTCTTCCCATCT | 2 | NC | NC | NC |
| 3652 | 6038 | TAAGGTCATGTCTTCCCATC | 2 | NC | NC | NC |
| 3653 | 6039 | CTAAGGTCATGTCTTCCCAT | 2 | NC | NC | NC |
| 3654 | 6040 | TCTAAGGTCATGTCTTCCCA | 2 | NC | NC | NC |
| 3655 | 6041 | TTCTAAGGTCATGTCTTCCC | 2 | NC | NC | NC |
| 3656 | 6042 | TTTCTAAGGTCATGTCTTCC | 2 | NC | NC | NC |
| 3657 | 6043 | CTTTCTAAGGTCATGTCTTC | 2 | NC | NC | NC |
| 3658 | 6054 | AAAACTCTCTCCTTTCTAAG | 1 | NC | NC | NC |
| 3659 | 6055 | GAAAACTCTCTCCTTTCTAA | 1 | NC | NC | NC |
| 3660 | 6056 | TGAAAACTCTCTCCTTTCTA | 2 | NC | NC | NC |
| 3661 | 6057 | CTGAAAACTCTCTCCTTTCT | 1 | NC | NC | NC |
| 3662 | 6058 | TCTGAAAACTCTCTCCTTTC | 1 | NC | NC | NC |
| 3663 | 6059 | CTCTGAAAACTCTCTCCTTT | 1 | NC | NC | NC |
| 3664 | 6060 | CCTCTGAAAACTCTCTCCTT | 1 | NC | NC | NC |
| 3665 | 6061 | TCCTCTGAAAACTCTCTCCT | 1 | NC | NC | NC |
| 3666 | 6062 | ATCCTCTGAAAACTCTCTCC | 1 | NC | NC | NC |
| 3667 | 6063 | AATCCTCTGAAAACTCTCTC | 1 | NC | NC | NC |
| 3668 | 6064 | AAATCCTCTGAAAACTCTCT | 1 | NC | NC | NC |
| 3669 | 6065 | CAAATCCTCTGAAAACTCTC | 2 | NC | NC | NC |
| 3670 | 6066 | GCAAATCCTCTGAAAACTCT | 2 | NC | NC | NC |
| 3671 | 6067 | GGCAAATCCTCTGAAAACTC | 2 | NC | NC | NC |
| 3672 | 6068 | TGGCAAATCCTCTGAAAACT | 1 | NC | NC | NC |
| 3673 | 6069 | CTGGCAAATCCTCTGAAAAC | 2 | NC | NC | NC |
| 3674 | 6070 | CCTGGCAAATCCTCTGAAAA | 1 | NC | NC | NC |
| 3675 | 6071 | GCCTGGCAAATCCTCTGAAA | 1 | NC | NC | NC |
| 3676 | 6072 | AGCCTGGCAAATCCTCTGAA | 1 | NC | NC | NC |
| 3677 | 6073 | CAGCCTGGCAAATCCTCTGA | 1 | NC | NC | NC |
| 3678 | 6074 | ACAGCCTGGCAAATCCTCTG | 2 | NC | NC | NC |
| 3679 | 6075 | GACAGCCTGGCAAATCCTCT | 1 | NC | NC | NC |
| 3680 | 6076 | TGACAGCCTGGCAAATCCTC | 2 | NC | NC | NC |
| 3681 | 6077 | CTGACAGCCTGGCAAATCCT | 2 | NC | NC | NC |
| 3682 | 6174 | TTACAACTCCCAGGACAGTT | 2 | NC | NC | NC |
| 3683 | 6175 | TTTACAACTCCCAGGACAGT | 1 | NC | NC | NC |
| 3684 | 6176 | TTTTACAACTCCCAGGACAG | 2 | NC | NC | NC |
| 3685 | 6177 | TTTTTACAACTCCCAGGACA | 2 | NC | NC | NC |
| 3686 | 6178 | ATTTTTACAACTCCCAGGAC | 2 | NC | NC | NC |
| 3687 | 6179 | GATTTTTACAACTCCCAGGA | 2 | NC | NC | NC |
| 3688 | 6180 | AGATTTTTACAACTCCCAGG | 2 | NC | NC | NC |
| 3689 | 6181 | AAGATTTTTACAACTCCCAG | 2 | NC | NC | NC |
| 3690 | 6182 | AAAGATTTTTACAACTCCCA | 2 | NC | NC | NC |
| 3691 | 6183 | AAAAGATTTTTACAACTCCC | 2 | NC | NC | NC |
| 3692 | 6184 | TAAAAGATTTTTACAACTCC | 2 | NC | NC | NC |
| 3693 | 6187 | CCTTAAAAGATTTTTACAAC | 2 | NC | NC | NC |
| 3694 | 6188 | GCCTTAAAAGATTTTTACAA | 1 | NC | NC | NC |
| 3695 | 6189 | GGCCTTAAAAGATTTTTACA | 2 | NC | NC | NC |
| 3696 | 6190 | TGGCCTTAAAAGATTTTTAC | 2 | NC | NC | NC |
| 3697 | 6191 | CTGGCCTTAAAAGATTTTTA | 1 | NC | NC | NC |
| 3698 | 6192 | TCTGGCCTTAAAAGATTTTT | 1 | NC | NC | NC |
| 3699 | 6193 | GTCTGGCCTTAAAAGATTTT | 2 | NC | NC | NC |
| 3700 | 6194 | GGTCTGGCCTTAAAAGATTT | 2 | NC | NC | NC |
| 3701 | 6206 | ATCCCTCAAATTGGTCTGGC | 2 | NC | NC | NC |
| 3702 | 6207 | AATCCCTCAAATTGGTCTGG | 2 | NC | NC | NC |
| 3703 | 6208 | AAATCCCTCAAATTGGTCTG | 2 | NC | NC | NC |
| 3704 | 6209 | AAAATCCCTCAAATTGGTCT | 2 | NC | NC | NC |
| 3705 | 6210 | TAAAATCCCTCAAATTGGTC | 2 | NC | NC | NC |
| 3706 | 6211 | TTAAAATCCCTCAAATTGGT | 2 | NC | NC | NC |
| 3707 | 6212 | TTTAAAATCCCTCAAATTGG | 1 | NC | NC | NC |
| 3708 | 6213 | TTTTAAAATCCCTCAAATTG | 2 | NC | NC | NC |
| 3709 | 6215 | CTTTTTAAAATCCCTCAAAT | 1 | NC | NC | NC |
| 3710 | 6216 | ACTTTTTAAAATCCCTCAAA | 1 | NC | NC | NC |
| 3711 | 6217 | CACTTTTTAAAATCCCTCAA | 2 | NC | NC | NC |
| 3712 | 6218 | ACACTTTTTAAAATCCCTCA | 1 | NC | NC | NC |
| 3713 | 6219 | GACACTTTTTAAAATCCCTC | 1 | NC | NC | NC |
| 3714 | 6220 | AGACACTTTTTAAAATCCCT | 1 | NC | NC | NC |
| 3715 | 6221 | GAGACACTTTTTAAAATCCC | 2 | NC | NC | NC |
| 3716 | 6222 | TGAGACACTTTTTAAAATCC | 1 | NC | NC | NC |
| 3717 | 6223 | CTGAGACACTTTTTAAAATC | 1 | NC | NC | NC |
| 3718 | 6224 | ACTGAGACACTTTTTAAAAT | 1 | NC | NC | NC |
| 3719 | 6225 | CACTGAGACACTTTTTAAAA | 1 | NC | NC | NC |
| 3720 | 6226 | GCACTGAGACACTTTTTAAA | 2 | NC | NC | NC |
| 3721 | 6227 | GGCACTGAGACACTTTTTAA | 2 | NC | NC | NC |
| 3722 | 6228 | AGGCACTGAGACACTTTTTA | 2 | NC | NC | NC |
| 3723 | 6242 | TCTGAAATCATAAGAGGCAC | 1 | NC | NC | NC |
| 3724 | 6243 | TTCTGAAATCATAAGAGGCA | 2 | NC | NC | NC |
| 3725 | 6244 | CTTCTGAAATCATAAGAGGC | 2 | NC | NC | NC |
| 3726 | 6245 | CCTTCTGAAATCATAAGAGG | 2 | NC | NC | NC |
| 3727 | 6246 | ACCTTCTGAAATCATAAGAG | 2 | NC | NC | NC |
| 3728 | 6247 | AACCTTCTGAAATCATAAGA | 2 | NC | NC | NC |
| 3729 | 6248 | AAACCTTCTGAAATCATAAG | 2 | NC | NC | NC |
| 3730 | 6249 | AAAACCTTCTGAAATCATAA | 2 | NC | NC | NC |
| 3731 | 6250 | CAAAACCTTCTGAAATCATA | 2 | NC | NC | NC |
| 3732 | 6251 | GCAAAACCTTCTGAAATCAT | 2 | NC | NC | NC |
| 3733 | 6252 | AGCAAAACCTTCTGAAATCA | 1 | NC | NC | NC |
| 3734 | 6253 | TAGCAAAACCTTCTGAAATC | 2 | NC | NC | NC |
| 3735 | 6254 | ATAGCAAAACCTTCTGAAAT | 1 | NC | NC | NC |
| 3736 | 6255 | TATAGCAAAACCTTCTGAAA | 2 | NC | NC | NC |
| 3737 | 6256 | ATATAGCAAAACCTTCTGAA | 2 | NC | NC | NC |
| 3738 | 6257 | CATATAGCAAAACCTTCTGA | 2 | NC | NC | NC |
| 3739 | 6258 | ACATATAGCAAAACCTTCTG | 2 | NC | NC | NC |
| 3740 | 6259 | TACATATAGCAAAACCTTCT | 2 | NC | NC | NC |
| 3741 | 6260 | TTACATATAGCAAAACCTTC | 2 | NC | NC | NC |
| 3742 | 6261 | ATTACATATAGCAAAACCTT | 2 | NC | NC | NC |
| 3743 | 6262 | GATTACATATAGCAAAACCT | 2 | NC | NC | NC |
| 3744 | 6263 | GGATTACATATAGCAAAACC | 2 | NC | NC | NC |
| 3745 | 6264 | GGGATTACATATAGCAAAAC | 2 | NC | NC | NC |
| 3746 | 6265 | TGGGATTACATATAGCAAAA | 2 | NC | NC | NC |
| 3747 | 6266 | TTGGGATTACATATAGCAAA | 2 | NC | NC | NC |
| 3748 | 6267 | GTTGGGATTACATATAGCAA | 2 | NC | NC | NC |
| 3749 | 6268 | AGTTGGGATTACATATAGCA | 2 | NC | NC | NC |
| 3750 | 6269 | TAGTTGGGATTACATATAGC | 2 | NC | NC | NC |
| 3751 | 6270 | GTAGTTGGGATTACATATAG | 2 | NC | NC | NC |
| 3752 | 6271 | AGTAGTTGGGATTACATATA | 1 | NC | NC | NC |
| 3753 | 6272 | CAGTAGTTGGGATTACATAT | 1 | NC | NC | NC |
| 3754 | 6273 | ACAGTAGTTGGGATTACATA | 1 | NC | NC | NC |
| 3755 | 6274 | AACAGTAGTTGGGATTACAT | 1 | NC | NC | NC |
| 3756 | 6275 | AAACAGTAGTTGGGATTACA | 2 | NC | NC | NC |
| 3757 | 6276 | AAAACAGTAGTTGGGATTAC | 2 | NC | NC | NC |
| 3758 | 6277 | GAAAACAGTAGTTGGGATTA | 2 | NC | NC | NC |
| 3759 | 6278 | AGAAAACAGTAGTTGGGATT | 1 | NC | NC | NC |
| 3760 | 6279 | AAGAAAACAGTAGTTGGGAT | 1 | NC | NC | NC |
| 3761 | 6280 | CAAGAAAACAGTAGTTGGGA | 2 | NC | NC | NC |
| 3762 | 6281 | TCAAGAAAACAGTAGTTGGG | 2 | NC | NC | NC |
| 3763 | 6282 | CTCAAGAAAACAGTAGTTGG | 2 | NC | NC | NC |
| 3764 | 6283 | TCTCAAGAAAACAGTAGTTG | 2 | NC | NC | NC |
| 3765 | 6285 | ACTCTCAAGAAAACAGTAGT | 2 | NC | NC | NC |
| 3766 | 6286 | TACTCTCAAGAAAACAGTAG | 2 | NC | NC | NC |
| 3767 | 6287 | CTACTCTCAAGAAAACAGTA | 2 | NC | NC | NC |
| 3768 | 6288 | GCTACTCTCAAGAAAACAGT | 2 | NC | NC | NC |
| 3769 | 6289 | TGCTACTCTCAAGAAAACAG | 2 | NC | NC | NC |
| 3770 | 6290 | CTGCTACTCTCAAGAAAACA | 2 | NC | NC | NC |
| 3771 | 6291 | TCTGCTACTCTCAAGAAAAC | 2 | NC | NC | NC |
| 3772 | 6292 | CTCTGCTACTCTCAAGAAAA | 2 | NC | NC | NC |
| 3773 | 6293 | CCTCTGCTACTCTCAAGAAA | 2 | NC | NC | NC |
| 3774 | 6294 | TCCTCTGCTACTCTCAAGAA | 2 | NC | NC | NC |
| 3775 | 6295 | ATCCTCTGCTACTCTCAAGA | 2 | NC | NC | NC |
| 3776 | 6296 | AATCCTCTGCTACTCTCAAG | 2 | NC | NC | NC |
| 3777 | 6297 | TAATCCTCTGCTACTCTCAA | 2 | NC | NC | NC |
| 3778 | 6298 | CTAATCCTCTGCTACTCTCA | 2 | NC | NC | NC |
| 3779 | 6299 | TCTAATCCTCTGCTACTCTC | 2 | NC | NC | NC |
| 3780 | 6300 | TTCTAATCCTCTGCTACTCT | 1 | NC | NC | NC |
| 3781 | 6301 | TTTCTAATCCTCTGCTACTC | 1 | NC | NC | NC |
| 3782 | 6302 | TTTTCTAATCCTCTGCTACT | 2 | NC | NC | NC |
| 3783 | 6303 | TTTTTCTAATCCTCTGCTAC | 2 | NC | NC | NC |
| 3784 | 6304 | CTTTTTCTAATCCTCTGCTA | 1 | NC | NC | NC |
| 3785 | 6305 | ACTTTTTCTAATCCTCTGCT | 1 | NC | NC | NC |
| 3786 | 6306 | GACTTTTTCTAATCCTCTGC | 1 | NC | NC | NC |
| 3787 | 6307 | GGACTTTTTCTAATCCTCTG | 2 | NC | NC | NC |
| 3788 | 6308 | AGGACTTTTTCTAATCCTCT | 2 | NC | NC | NC |
| 3789 | 6311 | TGGAGGACTTTTTCTAATCC | 1 | NC | NC | NC |
| 3790 | 6312 | ATGGAGGACTTTTTCTAATC | 1 | NC | NC | NC |
| 3791 | 6313 | TATGGAGGACTTTTTCTAAT | 1 | NC | NC | NC |
| 3792 | 6314 | TTATGGAGGACTTTTTCTAA | 2 | NC | NC | NC |
| 3793 | 6315 | TTTATGGAGGACTTTTTCTA | 2 | NC | NC | NC |
| 3794 | 6316 | ATTTATGGAGGACTTTTTCT | 2 | NC | NC | NC |
| 3795 | 6317 | AATTTATGGAGGACTTTTTC | 2 | NC | NC | NC |
| 3796 | 6318 | TAATTTATGGAGGACTTTTT | 2 | NC | NC | NC |
| 3797 | 6319 | ATAATTTATGGAGGACTTTT | 2 | NC | NC | NC |
| 3798 | 6320 | CATAATTTATGGAGGACTTT | 2 | NC | NC | NC |
| 3799 | 6330 | AGGCCGGTTACATAATTTAT | 2 | NC | NC | NC |
| 3800 | 6331 | AAGGCCGGTTACATAATTTA | 2 | NC | NC | NC |
| 3801 | 6332 | GAAGGCCGGTTACATAATTT | 2 | NC | NC | NC |
| 3802 | 6333 | GGAAGGCCGGTTACATAATT | 2 | NC | NC | NC |
| 3803 | 6347 | AGTCAGGCTAGTCAGGAAGG | 2 | NC | NC | NC |
| 3804 | 6348 | GAGTCAGGCTAGTCAGGAAG | 2 | NC | NC | NC |
| 3805 | 6349 | TGAGTCAGGCTAGTCAGGAA | 2 | NC | NC | NC |
| 3806 | 6350 | TTGAGTCAGGCTAGTCAGGA | 2 | NC | NC | NC |
| 3807 | 6351 | CTTGAGTCAGGCTAGTCAGG | 2 | NC | NC | NC |
| 3808 | 6352 | GCTTGAGTCAGGCTAGTCAG | 2 | NC | NC | NC |
| 3809 | 6353 | TGCTTGAGTCAGGCTAGTCA | 2 | NC | NC | NC |
| 3810 | 6354 | TTGCTTGAGTCAGGCTAGTC | 3 | NC | NC | NC |
| 3811 | 6355 | ATTGCTTGAGTCAGGCTAGT | 2 | NC | NC | NC |
| 3812 | 6356 | CATTGCTTGAGTCAGGCTAG | 2 | NC | NC | NC |
| 3813 | 6357 | ACATTGCTTGAGTCAGGCTA | 2 | NC | NC | NC |
| 3814 | 6358 | TACATTGCTTGAGTCAGGCT | 2 | NC | NC | NC |
| 3815 | 6359 | TTACATTGCTTGAGTCAGGC | 2 | NC | NC | NC |
| 3816 | 6360 | CTTACATTGCTTGAGTCAGG | 2 | NC | NC | NC |
| 3817 | 6361 | TCTTACATTGCTTGAGTCAG | 2 | NC | NC | NC |
| 3818 | 6362 | CTCTTACATTGCTTGAGTCA | 2 | NC | NC | NC |
| 3819 | 6363 | TCTCTTACATTGCTTGAGTC | 2 | NC | NC | NC |
| 3820 | 6364 | ATCTCTTACATTGCTTGAGT | 2 | NC | NC | NC |
| 3821 | 6365 | TATCTCTTACATTGCTTGAG | 2 | NC | NC | NC |
| 3822 | 6366 | TTATCTCTTACATTGCTTGA | 2 | NC | NC | NC |
| 3823 | 6367 | ATTATCTCTTACATTGCTTG | 2 | NC | NC | NC |
| 3824 | 6368 | AATTATCTCTTACATTGCTT | 2 | NC | NC | NC |
| 3825 | 6369 | TAATTATCTCTTACATTGCT | 2 | NC | NC | NC |
| 3826 | 6370 | ATAATTATCTCTTACATTGC | 2 | NC | NC | NC |
| 3827 | 6374 | CAGAATAATTATCTCTTACA | 1 | NC | NC | NC |
| 3828 | 6375 | ACAGAATAATTATCTCTTAC | 2 | NC | NC | NC |
| 3829 | 6379 | GAAAACAGAATAATTATCTC | 1 | NC | NC | NC |
| 3830 | 6396 | CCACACTTATAAATTATGAA | 2 | NC | NC | NC |
| 3831 | 6397 | CCCACACTTATAAATTATGA | 2 | NC | NC | NC |
| 3832 | 6398 | CCCCACACTTATAAATTATG | 2 | NC | NC | NC |
| 3833 | 6399 | CCCCCACACTTATAAATTAT | 2 | NC | NC | NC |
| 3834 | 6400 | GCCCCCACACTTATAAATTA | 2 | NC | NC | NC |
| 3835 | 6401 | TGCCCCCACACTTATAAATT | 2 | NC | NC | NC |
| 3836 | 6402 | ATGCCCCCACACTTATAAAT | 2 | NC | NC | NC |
| 3837 | 6403 | CATGCCCCCACACTTATAAA | 2 | NC | NC | NC |
| 3838 | 6404 | GCATGCCCCCACACTTATAA | 3 | NC | NC | NC |
| 3839 | 6405 | GGCATGCCCCCACACTTATA | 3 | NC | NC | NC |
| 3840 | 6423 | AGGTTGTTTTTATGCTGAGG | 2 | NC | NC | NC |
| 3841 | 6424 | TAGGTTGTTTTTATGCTGAG | 2 | NC | NC | NC |
| 3842 | 6425 | ATAGGTTGTTTTTATGCTGA | 1 | NC | NC | NC |
| 3843 | 6426 | AATAGGTTGTTTTTATGCTG | 1 | NC | NC | NC |
| 3844 | 6427 | TAATAGGTTGTTTTTATGCT | 2 | NC | NC | NC |
| 3845 | 6428 | CTAATAGGTTGTTTTTATGC | 2 | NC | NC | NC |
| 3846 | 6429 | CCTAATAGGTTGTTTTTATG | 2 | NC | NC | NC |
| 3847 | 6430 | CCCTAATAGGTTGTTTTTAT | 2 | NC | NC | NC |
| 3848 | 6431 | TCCCTAATAGGTTGTTTTTA | 2 | NC | NC | NC |
| 3849 | 6432 | TTCCCTAATAGGTTGTTTTT | 2 | NC | NC | NC |
| 3850 | 6433 | TTTCCCTAATAGGTTGTTTT | 1 | NC | NC | NC |
| 3851 | 6434 | TTTTCCCTAATAGGTTGTTT | 1 | NC | NC | NC |
| 3852 | 6435 | TTTTTCCCTAATAGGTTGTT | 1 | NC | NC | NC |
| 3853 | 6436 | ATTTTTCCCTAATAGGTTGT | 1 | NC | NC | NC |
| 3854 | 6437 | TATTTTTCCCTAATAGGTTG | 2 | NC | NC | NC |
| 3855 | 6438 | ATATTTTTCCCTAATAGGTT | 2 | NC | NC | NC |
| 3856 | 6439 | GATATTTTTCCCTAATAGGT | 1 | NC | NC | NC |
| 3857 | 6440 | AGATATTTTTCCCTAATAGG | 1 | NC | NC | NC |
| 3858 | 6441 | TAGATATTTTTCCCTAATAG | 1 | NC | NC | NC |
| 3859 | 6445 | CTATTAGATATTTTTCCCTA | 1 | NC | NC | NC |
| 3860 | 6446 | TCTATTAGATATTTTTCCCT | 1 | NC | NC | NC |
| 3861 | 6447 | ATCTATTAGATATTTTTCCC | 1 | NC | NC | NC |
| 3862 | 6457 | GATAAAGGTAATCTATTAGA | 2 | NC | NC | NC |
| 3863 | 6458 | CGATAAAGGTAATCTATTAG | 3 | NC | NC | NC |
| 3864 | 6459 | GCGATAAAGGTAATCTATTA | 3 | NC | NC | NC |
| 3865 | 6460 | GGCGATAAAGGTAATCTATT | 3 | NC | NC | NC |
| 3866 | 6461 | AGGCGATAAAGGTAATCTAT | 2 | NC | NC | NC |
| 3867 | 6462 | CAGGCGATAAAGGTAATCTA | 2 | NC | NC | NC |
| 3868 | 6463 | ACAGGCGATAAAGGTAATCT | 3 | NC | NC | NC |
| 3869 | 6464 | AACAGGCGATAAAGGTAATC | 2 | NC | NC | NC |
| 3870 | 6465 | TAACAGGCGATAAAGGTAAT | 2 | NC | NC | NC |
| 3871 | 6466 | CTAACAGGCGATAAAGGTAA | 2 | NC | NC | NC |
| 3872 | 6467 | CCTAACAGGCGATAAAGGTA | 2 | NC | NC | NC |
| 3873 | 6468 | CCCTAACAGGCGATAAAGGT | 3 | NC | NC | NC |
| 3874 | 6469 | ACCCTAACAGGCGATAAAGG | 3 | NC | NC | NC |
| 3875 | 6470 | AACCCTAACAGGCGATAAAG | 3 | NC | NC | NC |
| 3876 | 6471 | AAACCCTAACAGGCGATAAA | 2 | NC | NC | NC |
| 3877 | 6472 | AAAACCCTAACAGGCGATAA | 2 | NC | NC | NC |
| 3878 | 6473 | TAAAACCCTAACAGGCGATA | 2 | NC | NC | NC |
| 3879 | 6474 | ATAAAACCCTAACAGGCGAT | 2 | NC | NC | NC |
| 3880 | 6475 | CATAAAACCCTAACAGGCGA | 3 | NC | NC | NC |
| 3881 | 6476 | ACATAAAACCCTAACAGGCG | 3 | NC | NC | NC |
| 3882 | 6477 | AACATAAAACCCTAACAGGC | 2 | NC | NC | NC |
| 3883 | 6478 | CAACATAAAACCCTAACAGG | 1 | NC | NC | NC |
| 3884 | 6479 | ACAACATAAAACCCTAACAG | 1 | NC | NC | NC |
| 3885 | 6480 | AACAACATAAAACCCTAACA | 1 | NC | NC | NC |
| 3886 | 6481 | AAACAACATAAAACCCTAAC | 2 | NC | NC | NC |
| 3887 | 6482 | AAAACAACATAAAACCCTAA | 1 | NC | NC | NC |
| 3888 | 6483 | AAAAACAACATAAAACCCTA | 1 | NC | NC | NC |
| 3889 | 6484 | TAAAAACAACATAAAACCCT | 1 | NC | NC | NC |
| 3890 | 6485 | TTAAAAACAACATAAAACCC | 1 | NC | NC | NC |
| 3891 | 6486 | GTTAAAAACAACATAAAACC | 2 | NC | NC | NC |
| 3892 | 6490 | CTGAGTTAAAAACAACATAA | 1 | NC | NC | NC |
| 3893 | 6491 | TCTGAGTTAAAAACAACATA | 2 | NC | NC | NC |
| 3894 | 6492 | ATCTGAGTTAAAAACAACAT | 2 | NC | NC | NC |
| 3895 | 6493 | CATCTGAGTTAAAAACAACA | 1 | NC | NC | NC |
| 3896 | 6494 | GCATCTGAGTTAAAAACAAC | 2 | NC | NC | NC |
| 3897 | 6495 | GGCATCTGAGTTAAAAACAA | 2 | NC | NC | NC |
| 3898 | 6496 | TGGCATCTGAGTTAAAAACA | 2 | NC | NC | NC |
| 3899 | 6497 | ATGGCATCTGAGTTAAAAAC | 1 | NC | NC | NC |
| 3900 | 6498 | TATGGCATCTGAGTTAAAAA | 2 | NC | NC | NC |
| 3901 | 6499 | TTATGGCATCTGAGTTAAAA | 2 | NC | NC | NC |
| 3902 | 6500 | CTTATGGCATCTGAGTTAAA | 2 | NC | NC | NC |
| 3903 | 6501 | TCTTATGGCATCTGAGTTAA | 2 | NC | NC | NC |
| 3904 | 6502 | TTCTTATGGCATCTGAGTTA | 2 | NC | NC | NC |
| 3905 | 6503 | GTTCTTATGGCATCTGAGTT | 2 | NC | NC | NC |
| 3906 | 6504 | TGTTCTTATGGCATCTGAGT | 2 | NC | NC | NC |
| 3907 | 6505 | TTGTTCTTATGGCATCTGAG | 2 | NC | NC | NC |
| 3908 | 6506 | TTTGTTCTTATGGCATCTGA | 2 | NC | NC | NC |
| 3909 | 6507 | CTTTGTTCTTATGGCATCTG | 1 | NC | NC | NC |
| 3910 | 6508 | TCTTTGTTCTTATGGCATCT | 1 | NC | NC | NC |
| 3911 | 6509 | ATCTTTGTTCTTATGGCATC | 1 | NC | NC | NC |
| 3912 | 6510 | TATCTTTGTTCTTATGGCAT | 0 | NC | NC | NC |
| 3913 | 6511 | GTATCTTTGTTCTTATGGCA | 1 | NC | NC | NC |
| 3914 | 6512 | TGTATCTTTGTTCTTATGGC | 1 | NC | NC | NC |
| 3915 | 6513 | ATGTATCTTTGTTCTTATGG | 1 | NC | NC | NC |
| 3916 | 6514 | CATGTATCTTTGTTCTTATG | 2 | NC | NC | NC |
| 3917 | 6515 | ACATGTATCTTTGTTCTTAT | 2 | NC | NC | NC |
| 3918 | 6516 | TACATGTATCTTTGTTCTTA | 1 | NC | NC | NC |
| 3919 | 6517 | TTACATGTATCTTTGTTCTT | 2 | NC | NC | NC |
| 3920 | 6518 | ATTACATGTATCTTTGTTCT | 2 | NC | NC | NC |
| 3921 | 6519 | AATTACATGTATCTTTGTTC | 2 | NC | NC | NC |
| 3922 | 6550 | CACAATATAGGTATTAATGA | 2 | NC | NC | NC |
| 3923 | 6551 | GCACAATATAGGTATTAATG | 1 | NC | NC | NC |
| 3924 | 6552 | AGCACAATATAGGTATTAAT | 1 | NC | NC | NC |
| 3925 | 6553 | AAGCACAATATAGGTATTAA | 2 | NC | NC | NC |
| 3926 | 6554 | AAAGCACAATATAGGTATTA | 2 | NC | NC | NC |
| 3927 | 6555 | TAAAGCACAATATAGGTATT | 1 | NC | NC | NC |
| 3928 | 6556 | TTAAAGCACAATATAGGTAT | 1 | NC | NC | NC |
| 3929 | 6557 | CTTAAAGCACAATATAGGTA | 2 | NC | NC | NC |
| 3930 | 6558 | CCTTAAAGCACAATATAGGT | 2 | NC | NC | NC |
| 3931 | 6559 | ACCTTAAAGCACAATATAGG | 2 | NC | NC | NC |
| 3932 | 6560 | AACCTTAAAGCACAATATAG | 2 | NC | NC | NC |
| 3933 | 6561 | AAACCTTAAAGCACAATATA | 2 | NC | NC | NC |
| 3934 | 6562 | TAAACCTTAAAGCACAATAT | 1 | NC | NC | NC |
| 3935 | 6563 | GTAAACCTTAAAGCACAATA | 1 | NC | NC | NC |
| 3936 | 6564 | TGTAAACCTTAAAGCACAAT | 1 | NC | NC | NC |
| 3937 | 6565 | TTGTAAACCTTAAAGCACAA | 1 | NC | NC | NC |
| 3938 | 6566 | TTTGTAAACCTTAAAGCACA | 1 | NC | NC | NC |
| 3939 | 6567 | TTTTGTAAACCTTAAAGCAC | 1 | NC | NC | NC |
| 3940 | 6568 | ATTTTGTAAACCTTAAAGCA | 1 | NC | NC | NC |
| 3941 | 6569 | TATTTTGTAAACCTTAAAGC | 1 | NC | NC | NC |
| 3942 | 6592 | CTAAGATAAAGTATGAGAAA | 2 | NC | NC | NC |
| 3943 | 6593 | ACTAAGATAAAGTATGAGAA | 1 | NC | NC | NC |
| 3944 | 6594 | AACTAAGATAAAGTATGAGA | 1 | NC | NC | NC |
| 3945 | 6595 | AAACTAAGATAAAGTATGAG | 2 | NC | NC | NC |
| 3946 | 6597 | CTAAACTAAGATAAAGTATG | 2 | NC | NC | NC |
| 3947 | 6601 | GAAACTAAACTAAGATAAAG | 1 | NC | NC | NC |
| 3948 | 6604 | CAAGAAACTAAACTAAGATA | 1 | NC | NC | NC |
| 3949 | 6605 | TCAAGAAACTAAACTAAGAT | 1 | NC | NC | NC |
| 3950 | 6606 | GTCAAGAAACTAAACTAAGA | 1 | NC | NC | NC |
| 3951 | 6607 | TGTCAAGAAACTAAACTAAG | 2 | NC | NC | NC |
| 3952 | 6608 | CTGTCAAGAAACTAAACTAA | 2 | NC | NC | NC |
| 3953 | 6609 | ACTGTCAAGAAACTAAACTA | 2 | NC | NC | NC |
| 3954 | 6610 | GACTGTCAAGAAACTAAACT | 2 | NC | NC | NC |
| 3955 | 6611 | GGACTGTCAAGAAACTAAAC | 2 | NC | NC | NC |
| 3956 | 6612 | TGGACTGTCAAGAAACTAAA | 1 | NC | NC | NC |
| 3957 | 6613 | ATGGACTGTCAAGAAACTAA | 1 | NC | NC | NC |
| 3958 | 6614 | CATGGACTGTCAAGAAACTA | 2 | NC | NC | NC |
| 3959 | 6615 | TCATGGACTGTCAAGAAACT | 2 | NC | NC | NC |
| 3960 | 6616 | CTCATGGACTGTCAAGAAAC | 2 | NC | NC | NC |
| 3961 | 6617 | CCTCATGGACTGTCAAGAAA | 2 | NC | NC | NC |
| 3962 | 6625 | CCACCTTACCTCATGGACTG | 1 | NC | NC | NC |
| 3963 | 6626 | ACCACCTTACCTCATGGACT | 2 | NC | NC | NC |
| 3964 | 6627 | TACCACCTTACCTCATGGAC | 2 | NC | NC | NC |
| 3965 | 6628 | CTACCACCTTACCTCATGGA | 2 | NC | NC | NC |
| 3966 | 6630 | AGCTACCACCTTACCTCATG | 2 | NC | NC | NC |
| 3967 | 6631 | AAGCTACCACCTTACCTCAT | 2 | NC | NC | NC |
| 3968 | 6632 | AAAGCTACCACCTTACCTCA | 2 | NC | NC | NC |
| 3969 | 6633 | TAAAGCTACCACCTTACCTC | 2 | NC | NC | NC |
| 3970 | 6634 | ATAAAGCTACCACCTTACCT | 2 | NC | NC | NC |
| 3971 | 6635 | GATAAAGCTACCACCTTACC | 2 | NC | NC | NC |
| 3972 | 6636 | TGATAAAGCTACCACCTTAC | 2 | NC | NC | NC |
| 3973 | 6637 | GTGATAAAGCTACCACCTTA | 2 | NC | NC | NC |
| 3974 | 6643 | AAAATGGTGATAAAGCTACC | 1 | NC | NC | NC |
| 3975 | 6644 | TAAAATGGTGATAAAGCTAC | 1 | NC | NC | NC |
| 3976 | 6645 | GTAAAATGGTGATAAAGCTA | 1 | NC | NC | NC |
| 3977 | 6646 | TGTAAAATGGTGATAAAGCT | 2 | NC | NC | NC |
| 3978 | 6647 | TTGTAAAATGGTGATAAAGC | 2 | NC | NC | NC |
| 3979 | 6648 | TTTGTAAAATGGTGATAAAG | 1 | NC | NC | NC |
| 3980 | 6649 | CTTTGTAAAATGGTGATAAA | 1 | NC | NC | NC |
| 3981 | 6650 | ACTTTGTAAAATGGTGATAA | 1 | NC | NC | NC |
| 3982 | 6651 | CACTTTGTAAAATGGTGATA | 1 | NC | NC | NC |
| 3983 | 6652 | CCACTTTGTAAAATGGTGAT | 1 | NC | NC | NC |
| 3984 | 6653 | CCCACTTTGTAAAATGGTGA | 1 | NC | NC | NC |
| 3985 | 6654 | TCCCACTTTGTAAAATGGTG | 1 | NC | NC | NC |
| 3986 | 6655 | TTCCCACTTTGTAAAATGGT | 1 | NC | NC | NC |
| 3987 | 6656 | TTTCCCACTTTGTAAAATGG | 1 | NC | NC | NC |
| 3988 | 6657 | GTTTCCCACTTTGTAAAATG | 1 | NC | NC | NC |
| 3989 | 6658 | CGTTTCCCACTTTGTAAAAT | 2 | NC | NC | NC |
| 3990 | 6659 | TCGTTTCCCACTTTGTAAAA | 2 | NC | NC | NC |
| 3991 | 6660 | TTCGTTTCCCACTTTGTAAA | 1 | NC | NC | NC |
| 3992 | 6661 | CTTCGTTTCCCACTTTGTAA | 2 | NC | NC | NC |
| 3993 | 6662 | CCTTCGTTTCCCACTTTGTA | 2 | NC | NC | NC |
| 3994 | 6663 | ACCTTCGTTTCCCACTTTGT | 2 | NC | NC | NC |
| 3995 | 6664 | AACCTTCGTTTCCCACTTTG | 2 | NC | NC | NC |
| 3996 | 6665 | GAACCTTCGTTTCCCACTTT | 2 | NC | NC | NC |
| 3997 | 6666 | GGAACCTTCGTTTCCCACTT | 2 | NC | NC | NC |
| 3998 | 6667 | AGGAACCTTCGTTTCCCACT | 2 | NC | NC | NC |
| 3999 | 6668 | GAGGAACCTTCGTTTCCCAC | 2 | NC | NC | NC |
| 4000 | 6669 | AGAGGAACCTTCGTTTCCCA | 2 | NC | NC | NC |
| 4001 | 6670 | AAGAGGAACCTTCGTTTCCC | 2 | NC | NC | NC |
| 4002 | 6671 | TAAGAGGAACCTTCGTTTCC | 2 | NC | NC | NC |
| 4003 | 6672 | CTAAGAGGAACCTTCGTTTC | 2 | NC | NC | NC |
| 4004 | 6673 | CCTAAGAGGAACCTTCGTTT | 2 | NC | NC | NC |
| 4005 | 6684 | ACAACTAGGTTCCTAAGAGG | 1 | NC | NC | NC |
| 4006 | 6685 | GACAACTAGGTTCCTAAGAG | 2 | NC | NC | NC |
| 4007 | 6686 | TGACAACTAGGTTCCTAAGA | 2 | NC | NC | NC |
| 4008 | 6687 | GTGACAACTAGGTTCCTAAG | 2 | NC | NC | NC |
| 4009 | 6688 | GGTGACAACTAGGTTCCTAA | 2 | NC | NC | NC |
| 4010 | 6689 | AGGTGACAACTAGGTTCCTA | 2 | NC | NC | NC |
| 4011 | 6690 | AAGGTGACAACTAGGTTCCT | 2 | NC | NC | NC |
| 4012 | 6691 | AAAGGTGACAACTAGGTTCC | 2 | NC | NC | NC |
| 4013 | 6692 | CAAAGGTGACAACTAGGTTC | 2 | NC | NC | NC |
| 4014 | 6693 | ACAAAGGTGACAACTAGGTT | 2 | NC | NC | NC |
| 4015 | 6694 | TACAAAGGTGACAACTAGGT | 2 | NC | NC | NC |
| 4016 | 6695 | ATACAAAGGTGACAACTAGG | 2 | NC | NC | NC |
| 4017 | 6696 | TATACAAAGGTGACAACTAG | 2 | NC | NC | NC |
| 4018 | 6697 | TTATACAAAGGTGACAACTA | 2 | NC | NC | NC |
| 4019 | 6698 | ATTATACAAAGGTGACAACT | 2 | NC | NC | NC |
| 4020 | 6699 | TATTATACAAAGGTGACAAC | 2 | NC | NC | NC |
| 4021 | 6700 | TTATTATACAAAGGTGACAA | 2 | NC | NC | NC |
| 4022 | 6701 | TTTATTATACAAAGGTGACA | 2 | NC | NC | NC |
| 4023 | 6702 | TTTTATTATACAAAGGTGAC | 2 | NC | NC | NC |
| 4024 | 6703 | GTTTTATTATACAAAGGTGA | 2 | NC | NC | NC |
| 4025 | 6704 | AGTTTTATTATACAAAGGTG | 2 | NC | NC | NC |
| 4026 | 6706 | GAAGTTTTATTATACAAAGG | 2 | NC | NC | NC |
| 4027 | 6707 | CGAAGTTTTATTATACAAAG | 2 | NC | NC | NC |
| 4028 | 6710 | CTTCGAAGTTTTATTATACA | 2 | NC | NC | NC |
| 4029 | 6711 | GCTTCGAAGTTTTATTATAC | 2 | NC | NC | NC |
| 4030 | 6712 | AGCTTCGAAGTTTTATTATA | 2 | NC | NC | NC |
| 4031 | 6713 | GAGCTTCGAAGTTTTATTAT | 2 | NC | NC | NC |
| 4032 | 6730 | AACCAGTTAACAGCTCCGAG | 2 | NC | NC | NC |
| 4033 | 6731 | AAACCAGTTAACAGCTCCGA | 2 | NC | NC | NC |
| 4034 | 6732 | CAAACCAGTTAACAGCTCCG | 2 | NC | NC | NC |
| 4035 | 6733 | GCAAACCAGTTAACAGCTCC | 2 | NC | NC | NC |
| 4036 | 6734 | AGCAAACCAGTTAACAGCTC | 2 | NC | NC | NC |
| 4037 | 6735 | CAGCAAACCAGTTAACAGCT | 2 | NC | NC | NC |
| 4038 | 6736 | TCAGCAAACCAGTTAACAGC | 2 | NC | NC | NC |
| 4039 | 6737 | TTCAGCAAACCAGTTAACAG | 1 | NC | NC | NC |
| 4040 | 6738 | CTTCAGCAAACCAGTTAACA | 2 | NC | NC | NC |
| 4041 | 6739 | CCTTCAGCAAACCAGTTAAC | 2 | NC | NC | NC |
| 4042 | 6752 | TCTTACAGCTAAGCCTTCAG | 1 | NC | NC | NC |
| 4043 | 6753 | CTCTTACAGCTAAGCCTTCA | 1 | NC | NC | NC |
| 4044 | 6765 | TCTGAATTCTGGCTCTTACA | 1 | NC | NC | NC |
| 4045 | 6766 | GTCTGAATTCTGGCTCTTAC | 1 | NC | NC | NC |
| 4046 | 6767 | GGTCTGAATTCTGGCTCTTA | 1 | NC | NC | NC |
| 4047 | 6768 | GGGTCTGAATTCTGGCTCTT | 1 | NC | NC | NC |
| 4048 | 6769 | TGGGTCTGAATTCTGGCTCT | 0 | NC | NC | NC |
| 4049 | 6770 | CTGGGTCTGAATTCTGGCTC | 0 | NC | NC | NC |
| 4050 | 6771 | CCTGGGTCTGAATTCTGGCT | 0 | NC | NC | NC |
| 4051 | 6772 | ACCTGGGTCTGAATTCTGGC | 1 | NC | NC | NC |
| 4052 | 6791 | GCAGTTTGAAGTCACTCAGA | 2 | NC | NC | NC |
| 4053 | 6792 | TGCAGTTTGAAGTCACTCAG | 2 | NC | NC | NC |
| 4054 | 6793 | GTGCAGTTTGAAGTCACTCA | 2 | NC | NC | NC |
| 4055 | 6794 | TGTGCAGTTTGAAGTCACTC | 2 | NC | NC | NC |
| 4056 | 6795 | CTGTGCAGTTTGAAGTCACT | 2 | NC | NC | NC |
| 4057 | 6796 | ACTGTGCAGTTTGAAGTCAC | 2 | NC | NC | NC |
| 4058 | 6807 | TAATGGGAAGGACTGTGCAG | 2 | NC | NC | NC |
| 4059 | 6808 | ATAATGGGAAGGACTGTGCA | 2 | NC | NC | NC |
| 4060 | 6809 | AATAATGGGAAGGACTGTGC | 1 | NC | NC | NC |
| 4061 | 6810 | TAATAATGGGAAGGACTGTG | 2 | NC | NC | NC |
| 4062 | 6811 | GTAATAATGGGAAGGACTGT | 1 | NC | NC | NC |
| 4063 | 6812 | GGTAATAATGGGAAGGACTG | 1 | NC | NC | NC |
| 4064 | 6813 | GGGTAATAATGGGAAGGACT | 1 | NC | NC | NC |
| 4065 | 6814 | TGGGTAATAATGGGAAGGAC | 2 | NC | NC | NC |
| 4066 | 6815 | ATGGGTAATAATGGGAAGGA | 2 | NC | NC | NC |
| 4067 | 6816 | TATGGGTAATAATGGGAAGG | 2 | NC | NC | NC |
| 4068 | 6817 | ATATGGGTAATAATGGGAAG | 2 | NC | NC | NC |
| 4069 | 6818 | CATATGGGTAATAATGGGAA | 2 | NC | NC | NC |
| 4070 | 6819 | GCATATGGGTAATAATGGGA | 2 | NC | NC | NC |
| 4071 | 6820 | AGCATATGGGTAATAATGGG | 2 | NC | NC | NC |
| 4072 | 6821 | TAGCATATGGGTAATAATGG | 2 | NC | NC | NC |
| 4073 | 6822 | ATAGCATATGGGTAATAATG | 2 | NC | NC | NC |
| 4074 | 6823 | GATAGCATATGGGTAATAAT | 2 | NC | NC | NC |
| 4075 | 6824 | GGATAGCATATGGGTAATAA | 3 | NC | NC | NC |
| 4076 | 6825 | GGGATAGCATATGGGTAATA | 2 | NC | NC | NC |
| 4077 | 6826 | AGGGATAGCATATGGGTAAT | 3 | NC | NC | NC |
| 4078 | 6827 | AAGGGATAGCATATGGGTAA | 2 | NC | NC | NC |
| 4079 | 6828 | TAAGGGATAGCATATGGGTA | 2 | NC | NC | NC |
| 4080 | 6829 | ATAAGGGATAGCATATGGGT | 3 | NC | NC | NC |
| 4081 | 6830 | TATAAGGGATAGCATATGGG | 2 | NC | NC | NC |
| 4082 | 6831 | ATATAAGGGATAGCATATGG | 2 | NC | NC | NC |
| 4083 | 6832 | AATATAAGGGATAGCATATG | 2 | NC | NC | NC |
| 4084 | 6833 | AAATATAAGGGATAGCATAT | 2 | NC | NC | NC |
| 4085 | 6834 | AAAATATAAGGGATAGCATA | 2 | NC | NC | NC |
| 4086 | 6835 | AAAAATATAAGGGATAGCAT | 1 | NC | NC | NC |
| 4087 | 6836 | TAAAAATATAAGGGATAGCA | 2 | NC | NC | NC |
| 4088 | 6837 | TTAAAAATATAAGGGATAGC | 1 | NC | NC | NC |
| 4089 | 6869 | CCAAGTTTATAAATGAATGA | 1 | NC | NC | NC |
| 4090 | 6870 | ACCAAGTTTATAAATGAATG | 1 | NC | NC | NC |
| 4091 | 6871 | CACCAAGTTTATAAATGAAT | 1 | NC | NC | NC |
| 4092 | 6872 | TCACCAAGTTTATAAATGAA | 1 | NC | NC | NC |
| 4093 | 6873 | ATCACCAAGTTTATAAATGA | 2 | NC | NC | NC |
| 4094 | 6874 | AATCACCAAGTTTATAAATG | 1 | NC | NC | NC |
| 4095 | 6875 | GAATCACCAAGTTTATAAAT | 1 | NC | NC | NC |
| 4096 | 6876 | TGAATCACCAAGTTTATAAA | 1 | NC | NC | NC |
| 4097 | 6877 | GTGAATCACCAAGTTTATAA | 2 | NC | NC | NC |
| 4098 | 6888 | ATCTAATAAAGGTGAATCAC | 2 | NC | NC | NC |
| 4099 | 6889 | AATCTAATAAAGGTGAATCA | 2 | NC | NC | NC |
| 4100 | 6890 | GAATCTAATAAAGGTGAATC | 2 | NC | NC | NC |
| 4101 | 6891 | AGAATCTAATAAAGGTGAAT | 2 | NC | NC | NC |
| 4102 | 6892 | CAGAATCTAATAAAGGTGAA | 1 | NC | NC | NC |
| 4103 | 6893 | CCAGAATCTAATAAAGGTGA | 2 | NC | NC | NC |
| 4104 | 6894 | ACCAGAATCTAATAAAGGTG | 2 | NC | NC | NC |
| 4105 | 6895 | GACCAGAATCTAATAAAGGT | 2 | NC | NC | NC |
| 4106 | 6896 | CGACCAGAATCTAATAAAGG | 2 | NC | NC | NC |
| 4107 | 6897 | GCGACCAGAATCTAATAAAG | 2 | NC | NC | NC |
| 4108 | 6898 | AGCGACCAGAATCTAATAAA | 3 | NC | NC | NC |
| 4109 | 6899 | CAGCGACCAGAATCTAATAA | 3 | NC | NC | NC |
| 4110 | 6900 | TCAGCGACCAGAATCTAATA | 2 | NC | NC | NC |
| 4111 | 6901 | TTCAGCGACCAGAATCTAAT | 2 | NC | NC | NC |
| 4112 | 6902 | CTTCAGCGACCAGAATCTAA | 2 | NC | NC | NC |
| 4113 | 6903 | CCTTCAGCGACCAGAATCTA | 1 | NC | NC | NC |
| 4114 | 6904 | GCCTTCAGCGACCAGAATCT | 2 | NC | NC | NC |
| 4115 | 6916 | GAAGTTACTAAAGCCTTCAG | 1 | NC | NC | NC |
| 4116 | 6918 | CTGAAGTTACTAAAGCCTTC | 2 | NC | NC | NC |
| 4117 | 6919 | TCTGAAGTTACTAAAGCCTT | 2 | NC | NC | NC |
| 4118 | 6920 | CTCTGAAGTTACTAAAGCCT | 2 | NC | NC | NC |
| 4119 | 6921 | ACTCTGAAGTTACTAAAGCC | 2 | NC | NC | NC |
| 4120 | 6922 | TACTCTGAAGTTACTAAAGC | 2 | NC | NC | NC |
| 4121 | 6923 | TTACTCTGAAGTTACTAAAG | 1 | NC | NC | NC |
| 4122 | 6924 | TTTACTCTGAAGTTACTAAA | 1 | NC | NC | NC |
| 4123 | 6925 | TTTTACTCTGAAGTTACTAA | 1 | NC | NC | NC |
| 4124 | 6926 | GTTTTACTCTGAAGTTACTA | 2 | NC | NC | NC |
| 4125 | 6927 | AGTTTTACTCTGAAGTTACT | 2 | NC | NC | NC |
| 4126 | 6928 | AAGTTTTACTCTGAAGTTAC | 2 | NC | NC | NC |
| 4127 | 6929 | CAAGTTTTACTCTGAAGTTA | 2 | NC | NC | NC |
| 4128 | 6930 | TCAAGTTTTACTCTGAAGTT | 2 | NC | NC | NC |
| 4129 | 6932 | TCTCAAGTTTTACTCTGAAG | 1 | NC | NC | NC |
| 4130 | 6933 | CTCTCAAGTTTTACTCTGAA | 2 | NC | NC | NC |
| 4131 | 6934 | TCTCTCAAGTTTTACTCTGA | 2 | NC | NC | NC |
| 4132 | 6935 | ATCTCTCAAGTTTTACTCTG | 1 | NC | NC | NC |
| 4133 | 6936 | CATCTCTCAAGTTTTACTCT | 2 | NC | NC | NC |
| 4134 | 6937 | TCATCTCTCAAGTTTTACTC | 2 | NC | NC | NC |
| 4135 | 6938 | CTCATCTCTCAAGTTTTACT | 2 | NC | NC | NC |
| 4136 | 6939 | TCTCATCTCTCAAGTTTTAC | 2 | NC | NC | NC |
| 4137 | 6940 | ATCTCATCTCTCAAGTTTTA | 2 | NC | NC | NC |
| 4138 | 6941 | CATCTCATCTCTCAAGTTTT | 1 | NC | NC | NC |
| 4139 | 6942 | ACATCTCATCTCTCAAGTTT | 2 | NC | NC | NC |
| 4140 | 6943 | TACATCTCATCTCTCAAGTT | 2 | NC | NC | NC |
| 4141 | 6944 | TTACATCTCATCTCTCAAGT | 1 | NC | NC | NC |
| 4142 | 6945 | TTTACATCTCATCTCTCAAG | 1 | NC | NC | NC |
| 4143 | 6946 | TTTTACATCTCATCTCTCAA | 2 | NC | NC | NC |
| 4144 | 6947 | ATTTTACATCTCATCTCTCA | 1 | NC | NC | NC |
| 4145 | 6948 | CATTTTACATCTCATCTCTC | 1 | NC | NC | NC |
| 4146 | 6949 | GCATTTTACATCTCATCTCT | 2 | NC | NC | NC |
| 4147 | 6950 | TGCATTTTACATCTCATCTC | 1 | NC | NC | NC |
| 4148 | 6951 | CTGCATTTTACATCTCATCT | 2 | NC | NC | NC |
| 4149 | 6952 | GCTGCATTTTACATCTCATC | 2 | NC | NC | NC |
| 4150 | 6953 | GGCTGCATTTTACATCTCAT | 2 | NC | NC | NC |
| 4151 | 6954 | TGGCTGCATTTTACATCTCA | 2 | NC | NC | NC |
| 4152 | 6955 | ATGGCTGCATTTTACATCTC | 2 | NC | NC | NC |
| 4153 | 6956 | AATGGCTGCATTTTACATCT | 2 | NC | NC | NC |
| 4154 | 6957 | GAATGGCTGCATTTTACATC | 2 | NC | NC | NC |
| 4155 | 6958 | AGAATGGCTGCATTTTACAT | 2 | NC | NC | NC |
| 4156 | 6959 | AAGAATGGCTGCATTTTACA | 1 | NC | NC | NC |
| 4157 | 6960 | CAAGAATGGCTGCATTTTAC | 2 | NC | NC | NC |
| 4158 | 6961 | TCAAGAATGGCTGCATTTTA | 1 | NC | NC | NC |
| 4159 | 6962 | CTCAAGAATGGCTGCATTTT | 1 | NC | NC | NC |
| 4160 | 6963 | TCTCAAGAATGGCTGCATTT | 2 | NC | NC | NC |
| 4161 | 6964 | CTCTCAAGAATGGCTGCATT | 2 | NC | NC | NC |
| 4162 | 6965 | ACTCTCAAGAATGGCTGCAT | 2 | NC | NC | NC |
| 4163 | 6966 | AACTCTCAAGAATGGCTGCA | 1 | NC | NC | NC |
| 4164 | 6967 | GAACTCTCAAGAATGGCTGC | 2 | NC | NC | NC |
| 4165 | 6968 | GGAACTCTCAAGAATGGCTG | 2 | NC | NC | NC |
| 4166 | 6969 | AGGAACTCTCAAGAATGGCT | 2 | NC | NC | NC |
| 4167 | 6970 | AAGGAACTCTCAAGAATGGC | 2 | NC | NC | NC |
| 4168 | 6971 | AAAGGAACTCTCAAGAATGG | 2 | NC | NC | NC |
| 4169 | 6972 | AAAAGGAACTCTCAAGAATG | 2 | NC | NC | NC |
| 4170 | 6973 | AAAAAGGAACTCTCAAGAAT | 2 | NC | NC | NC |
| 4171 | 6974 | GAAAAAGGAACTCTCAAGAA | 2 | NC | NC | NC |
| 4172 | 6975 | AGAAAAAGGAACTCTCAAGA | 2 | NC | NC | NC |
| 4173 | 6976 | CAGAAAAAGGAACTCTCAAG | 1 | NC | NC | NC |
| 4174 | 6977 | ACAGAAAAAGGAACTCTCAA | 1 | NC | NC | NC |
| 4175 | 6978 | TACAGAAAAAGGAACTCTCA | 1 | NC | NC | NC |
| 4176 | 6979 | TTACAGAAAAAGGAACTCTC | 2 | NC | NC | NC |
| 4177 | 6980 | GTTACAGAAAAAGGAACTCT | 1 | NC | NC | NC |
| 4178 | 6981 | TGTTACAGAAAAAGGAACTC | 2 | NC | NC | NC |
| 4179 | 6983 | AATGTTACAGAAAAAGGAAC | 1 | NC | NC | NC |
| 4180 | 6984 | GAATGTTACAGAAAAAGGAA | 1 | NC | NC | NC |
| 4181 | 6985 | TGAATGTTACAGAAAAAGGA | 1 | NC | NC | NC |
| 4182 | 6986 | ATGAATGTTACAGAAAAAGG | 2 | NC | NC | NC |
| 4183 | 6987 | GATGAATGTTACAGAAAAAG | 2 | NC | NC | NC |
| 4184 | 6988 | TGATGAATGTTACAGAAAAA | 1 | NC | NC | NC |
| 4185 | 6989 | TTGATGAATGTTACAGAAAA | 1 | NC | NC | NC |
| 4186 | 6990 | GTTGATGAATGTTACAGAAA | 1 | NC | NC | NC |
| 4187 | 6991 | TGTTGATGAATGTTACAGAA | 1 | NC | NC | NC |
| 4188 | 6992 | GTGTTGATGAATGTTACAGA | 2 | NC | NC | NC |
| 4189 | 6993 | AGTGTTGATGAATGTTACAG | 2 | NC | NC | NC |
| 4190 | 6994 | AAGTGTTGATGAATGTTACA | 2 | NC | NC | NC |
| 4191 | 6995 | GAAGTGTTGATGAATGTTAC | 2 | NC | NC | NC |
| 4192 | 6996 | TGAAGTGTTGATGAATGTTA | 2 | NC | NC | NC |
| 4193 | 6997 | ATGAAGTGTTGATGAATGTT | 1 | NC | NC | NC |
| 4194 | 6998 | AATGAAGTGTTGATGAATGT | 1 | NC | NC | NC |
| 4195 | 6999 | CAATGAAGTGTTGATGAATG | 1 | NC | NC | NC |
| 4196 | 7000 | TCAATGAAGTGTTGATGAAT | 1 | NC | NC | NC |
| 4197 | 7001 | CTCAATGAAGTGTTGATGAA | 1 | NC | NC | NC |
| 4198 | 7002 | TCTCAATGAAGTGTTGATGA | 2 | NC | NC | NC |
| 4199 | 7003 | TTCTCAATGAAGTGTTGATG | 2 | NC | NC | NC |
| 4200 | 7012 | AACCTTCACTTCTCAATGAA | 2 | NC | NC | NC |
| 4201 | 7013 | GAACCTTCACTTCTCAATGA | 2 | NC | NC | NC |
| 4202 | 7014 | GGAACCTTCACTTCTCAATG | 2 | NC | NC | NC |
| 4203 | 7015 | AGGAACCTTCACTTCTCAAT | 2 | NC | NC | NC |
| 4204 | 7016 | TAGGAACCTTCACTTCTCAA | 2 | NC | NC | NC |
| 4205 | 7017 | ATAGGAACCTTCACTTCTCA | 2 | NC | NC | NC |
| 4206 | 7018 | CATAGGAACCTTCACTTCTC | 2 | NC | NC | NC |
| 4207 | 7019 | CCATAGGAACCTTCACTTCT | 2 | NC | NC | NC |
| 4208 | 7020 | GCCATAGGAACCTTCACTTC | 2 | NC | NC | NC |
| 4209 | 7021 | AGCCATAGGAACCTTCACTT | 2 | NC | NC | NC |
| 4210 | 7022 | CAGCCATAGGAACCTTCACT | 2 | NC | NC | NC |
| 4211 | 7023 | ACAGCCATAGGAACCTTCAC | 2 | NC | NC | NC |
| 4212 | 7024 | GACAGCCATAGGAACCTTCA | 3 | NC | NC | NC |
| 4213 | 7025 | AGACAGCCATAGGAACCTTC | 2 | NC | NC | NC |
| 4214 | 7026 | GAGACAGCCATAGGAACCTT | 2 | NC | NC | NC |
| 4215 | 7027 | AGAGACAGCCATAGGAACCT | 2 | NC | NC | NC |
| 4216 | 7028 | TAGAGACAGCCATAGGAACC | 2 | NC | NC | NC |
| 4217 | 7029 | GTAGAGACAGCCATAGGAAC | 2 | NC | NC | NC |
| 4218 | 7030 | GGTAGAGACAGCCATAGGAA | 1 | NC | NC | NC |
| 4219 | 7031 | AGGTAGAGACAGCCATAGGA | 2 | NC | NC | NC |
| 4220 | 7032 | AAGGTAGAGACAGCCATAGG | 2 | NC | NC | NC |
| 4221 | 7033 | GAAGGTAGAGACAGCCATAG | 1 | NC | NC | NC |
| 4222 | 7034 | TGAAGGTAGAGACAGCCATA | 2 | NC | NC | NC |
| 4223 | 7035 | TTGAAGGTAGAGACAGCCAT | 2 | NC | NC | NC |
| 4224 | 7036 | CTTGAAGGTAGAGACAGCCA | 2 | NC | NC | NC |
| 4225 | 7037 | TCTTGAAGGTAGAGACAGCC | 2 | NC | NC | NC |
| 4226 | 7049 | TAAAGCTAAGCCTCTTGAAG | 1 | NC | NC | NC |
| 4227 | 7050 | CTAAAGCTAAGCCTCTTGAA | 0 | NC | NC | NC |
| 4228 | 7051 | ACTAAAGCTAAGCCTCTTGA | 1 | NC | NC | NC |
| 4229 | 7052 | GACTAAAGCTAAGCCTCTTG | 2 | NC | NC | NC |
| 4230 | 7053 | TGACTAAAGCTAAGCCTCTT | 2 | NC | NC | NC |
| 4231 | 7054 | GTGACTAAAGCTAAGCCTCT | 2 | NC | NC | NC |
| 4232 | 7055 | AGTGACTAAAGCTAAGCCTC | 2 | NC | NC | NC |
| 4233 | 7056 | CAGTGACTAAAGCTAAGCCT | 1 | NC | NC | NC |
| 4234 | 7057 | TCAGTGACTAAAGCTAAGCC | 2 | NC | NC | NC |
| 4235 | 7058 | CTCAGTGACTAAAGCTAAGC | 1 | NC | NC | NC |
| 4236 | 7059 | TCTCAGTGACTAAAGCTAAG | 1 | NC | NC | NC |
| 4237 | 7060 | TTCTCAGTGACTAAAGCTAA | 2 | NC | NC | NC |
| 4238 | 7061 | TTTCTCAGTGACTAAAGCTA | 1 | NC | NC | NC |
| 4239 | 7062 | CTTTCTCAGTGACTAAAGCT | 2 | NC | NC | NC |
| 4240 | 7063 | TCTTTCTCAGTGACTAAAGC | 2 | NC | NC | NC |
| 4241 | 7064 | GTCTTTCTCAGTGACTAAAG | 2 | NC | NC | NC |
| 4242 | 7065 | TGTCTTTCTCAGTGACTAAA | 2 | NC | NC | NC |
| 4243 | 7066 | TTGTCTTTCTCAGTGACTAA | 2 | NC | NC | NC |
| 4244 | 7067 | CTTGTCTTTCTCAGTGACTA | 1 | NC | NC | NC |
| 4245 | 7068 | CCTTGTCTTTCTCAGTGACT | 2 | NC | NC | NC |
| 4246 | 7069 | TCCTTGTCTTTCTCAGTGAC | 2 | NC | NC | NC |
| 4247 | 7070 | TTCCTTGTCTTTCTCAGTGA | 2 | NC | NC | NC |
| 4248 | 7071 | TTTCCTTGTCTTTCTCAGTG | 2 | NC | NC | NC |
| 4249 | 7072 | GTTTCCTTGTCTTTCTCAGT | 1 | NC | NC | NC |
| 4250 | 7073 | AGTTTCCTTGTCTTTCTCAG | 1 | NC | NC | NC |
| 4251 | 7074 | TAGTTTCCTTGTCTTTCTCA | 1 | NC | NC | NC |
| 4252 | 7075 | TTAGTTTCCTTGTCTTTCTC | 1 | NC | NC | NC |
| 4253 | 7076 | ATTAGTTTCCTTGTCTTTCT | 1 | NC | NC | NC |
| 4254 | 7077 | CATTAGTTTCCTTGTCTTTC | 1 | NC | NC | NC |
| 4255 | 7078 | TCATTAGTTTCCTTGTCTTT | 1 | NC | NC | NC |
| 4256 | 7079 | ATCATTAGTTTCCTTGTCTT | 2 | NC | NC | NC |
| 4257 | 7080 | TATCATTAGTTTCCTTGTCT | 2 | NC | NC | NC |
| 4258 | 7081 | CTATCATTAGTTTCCTTGTC | 2 | NC | NC | NC |
| 4259 | 7082 | TCTATCATTAGTTTCCTTGT | 2 | NC | NC | NC |
| 4260 | 7083 | TTCTATCATTAGTTTCCTTG | 2 | NC | NC | NC |
| 4261 | 7084 | ATTCTATCATTAGTTTCCTT | 1 | NC | NC | NC |
| 4262 | 7085 | TATTCTATCATTAGTTTCCT | 2 | NC | NC | NC |
| 4263 | 7086 | ATATTCTATCATTAGTTTCC | 2 | NC | NC | NC |
| 4264 | 7091 | CTACTATATTCTATCATTAG | 2 | NC | NC | NC |
| 4265 | 7092 | GCTACTATATTCTATCATTA | 2 | NC | NC | NC |
| 4266 | 7093 | AGCTACTATATTCTATCATT | 1 | NC | NC | NC |
| 4267 | 7094 | AAGCTACTATATTCTATCAT | 1 | NC | NC | NC |
| 4268 | 7095 | GAAGCTACTATATTCTATCA | 2 | NC | NC | NC |
| 4269 | 7096 | AGAAGCTACTATATTCTATC | 2 | NC | NC | NC |
| 4270 | 7097 | AAGAAGCTACTATATTCTAT | 2 | NC | NC | NC |
| 4271 | 7098 | GAAGAAGCTACTATATTCTA | 2 | NC | NC | NC |
| 4272 | 7099 | AGAAGAAGCTACTATATTCT | 2 | NC | NC | NC |
| 4273 | 7100 | CAGAAGAAGCTACTATATTC | 1 | NC | NC | NC |
| 4274 | 7101 | CCAGAAGAAGCTACTATATT | 1 | NC | NC | NC |
| 4275 | 7102 | GCCAGAAGAAGCTACTATAT | 2 | NC | NC | NC |
| 4276 | 7103 | CGCCAGAAGAAGCTACTATA | 1 | NC | NC | NC |
| 4277 | 7104 | ACGCCAGAAGAAGCTACTAT | 2 | NC | NC | NC |
| 4278 | 7105 | AACGCCAGAAGAAGCTACTA | 3 | NC | NC | NC |
| 4279 | 7106 | TAACGCCAGAAGAAGCTACT | 2 | NC | NC | NC |
| 4280 | 7107 | CTAACGCCAGAAGAAGCTAC | 2 | NC | NC | NC |
| 4281 | 7108 | CCTAACGCCAGAAGAAGCTA | 3 | NC | NC | NC |
| 4282 | 7109 | ACCTAACGCCAGAAGAAGCT | 2 | NC | NC | NC |
| 4283 | 7110 | TACCTAACGCCAGAAGAAGC | 3 | NC | NC | NC |
| 4284 | 7111 | ATACCTAACGCCAGAAGAAG | 2 | NC | NC | NC |
| 4285 | 7112 | GATACCTAACGCCAGAAGAA | 3 | NC | NC | NC |
| 4286 | 7113 | TGATACCTAACGCCAGAAGA | 2 | NC | NC | NC |
| 4287 | 7114 | GTGATACCTAACGCCAGAAG | 3 | NC | NC | NC |
| 4288 | 7115 | TGTGATACCTAACGCCAGAA | 2 | NC | NC | NC |
| 4289 | 7116 | CTGTGATACCTAACGCCAGA | 2 | NC | NC | NC |
| 4290 | 7117 | TCTGTGATACCTAACGCCAG | 3 | NC | NC | NC |
| 4291 | 7118 | CTCTGTGATACCTAACGCCA | 2 | NC | NC | NC |
| 4292 | 7119 | ACTCTGTGATACCTAACGCC | 2 | NC | NC | NC |
| 4293 | 7120 | GACTCTGTGATACCTAACGC | 2 | NC | NC | NC |
| 4294 | 7121 | TGACTCTGTGATACCTAACG | 2 | NC | NC | NC |
| 4295 | 7122 | GTGACTCTGTGATACCTAAC | 2 | NC | NC | NC |
| 4296 | 7123 | TGTGACTCTGTGATACCTAA | 2 | NC | NC | NC |
| 4297 | 7124 | CTGTGACTCTGTGATACCTA | 2 | NC | NC | NC |
| 4298 | 7125 | GCTGTGACTCTGTGATACCT | 2 | NC | NC | NC |
| 4299 | 7126 | AGCTGTGACTCTGTGATACC | 2 | NC | NC | NC |
| 4300 | 7127 | TAGCTGTGACTCTGTGATAC | 2 | NC | NC | NC |
| 4301 | 7128 | CTAGCTGTGACTCTGTGATA | 2 | NC | NC | NC |
| 4302 | 7129 | ACTAGCTGTGACTCTGTGAT | 1 | NC | NC | NC |
| 4303 | 7130 | AACTAGCTGTGACTCTGTGA | 2 | NC | NC | NC |
| 4304 | 7131 | TAACTAGCTGTGACTCTGTG | 2 | NC | NC | NC |
| 4305 | 7132 | GTAACTAGCTGTGACTCTGT | 2 | NC | NC | NC |
| 4306 | 7133 | TGTAACTAGCTGTGACTCTG | 2 | NC | NC | NC |
| 4307 | 7134 | CTGTAACTAGCTGTGACTCT | 2 | NC | NC | NC |
| 4308 | 7145 | TAAAGGGCTAGCTGTAACTA | 3 | NC | NC | NC |
| 4309 | 7146 | ATAAAGGGCTAGCTGTAACT | 2 | NC | NC | NC |
| 4310 | 7147 | AATAAAGGGCTAGCTGTAAC | 3 | NC | NC | NC |
| 4311 | 7148 | TAATAAAGGGCTAGCTGTAA | 2 | NC | NC | NC |
| 4312 | 7149 | ATAATAAAGGGCTAGCTGTA | 2 | NC | NC | NC |
| 4313 | 7150 | AATAATAAAGGGCTAGCTGT | 2 | NC | NC | NC |
| 4314 | 7151 | CAATAATAAAGGGCTAGCTG | 2 | NC | NC | NC |
| 4315 | 7152 | TCAATAATAAAGGGCTAGCT | 1 | NC | NC | NC |
| 4316 | 7153 | TTCAATAATAAAGGGCTAGC | 1 | NC | NC | NC |
| 4317 | 7154 | TTTCAATAATAAAGGGCTAG | 1 | NC | NC | NC |
| 4318 | 7155 | CTTTCAATAATAAAGGGCTA | 2 | NC | NC | NC |
| 4319 | 7156 | TCTTTCAATAATAAAGGGCT | 2 | NC | NC | NC |
| 4320 | 7157 | TTCTTTCAATAATAAAGGGC | 1 | NC | NC | NC |
| 4321 | 7158 | CTTCTTTCAATAATAAAGGG | 2 | NC | NC | NC |
| 4322 | 7159 | TCTTCTTTCAATAATAAAGG | 1 | NC | NC | NC |
| 4323 | 7160 | CTCTTCTTTCAATAATAAAG | 2 | NC | NC | NC |
| 4324 | 7161 | CCTCTTCTTTCAATAATAAA | 2 | NC | NC | NC |
| 4325 | 7162 | TCCTCTTCTTTCAATAATAA | 2 | NC | NC | NC |
| 4326 | 7163 | CTCCTCTTCTTTCAATAATA | 1 | NC | NC | NC |
| 4327 | 7164 | GCTCCTCTTCTTTCAATAAT | 2 | NC | NC | NC |
| 4328 | 7165 | AGCTCCTCTTCTTTCAATAA | 2 | NC | NC | NC |
| 4329 | 7166 | TAGCTCCTCTTCTTTCAATA | 2 | NC | NC | NC |
| 4330 | 7167 | CTAGCTCCTCTTCTTTCAAT | 2 | NC | NC | NC |
| 4331 | 7168 | GCTAGCTCCTCTTCTTTCAA | 2 | NC | NC | NC |
| 4332 | 7169 | TGCTAGCTCCTCTTCTTTCA | 2 | NC | NC | NC |
| 4333 | 7170 | CTGCTAGCTCCTCTTCTTTC | 1 | NC | NC | NC |
| 4334 | 7171 | ACTGCTAGCTCCTCTTCTTT | 1 | NC | NC | NC |
| 4335 | 7172 | GACTGCTAGCTCCTCTTCTT | 2 | NC | NC | NC |
| 4336 | 7173 | GGACTGCTAGCTCCTCTTCT | 2 | NC | NC | NC |
| 4337 | 7175 | TGGGACTGCTAGCTCCTCTT | 2 | NC | NC | NC |
| 4338 | 7178 | TAGTGGGACTGCTAGCTCCT | 2 | NC | NC | NC |
| 4339 | 7179 | ATAGTGGGACTGCTAGCTCC | 2 | NC | NC | NC |
| 4340 | 7180 | GATAGTGGGACTGCTAGCTC | 3 | NC | NC | NC |
| 4341 | 7181 | TGATAGTGGGACTGCTAGCT | 2 | NC | NC | NC |
| 4342 | 7182 | CTGATAGTGGGACTGCTAGC | 2 | NC | NC | NC |
| 4343 | 7183 | TCTGATAGTGGGACTGCTAG | 2 | NC | NC | NC |
| 4344 | 7184 | TTCTGATAGTGGGACTGCTA | 3 | NC | NC | NC |
| 4345 | 7185 | ATTCTGATAGTGGGACTGCT | 2 | NC | NC | NC |
| 4346 | 7186 | AATTCTGATAGTGGGACTGC | 2 | NC | NC | NC |
| 4347 | 7187 | TAATTCTGATAGTGGGACTG | 2 | NC | NC | NC |
| 4348 | 7188 | TTAATTCTGATAGTGGGACT | 3 | NC | NC | NC |
| 4349 | 7189 | CTTAATTCTGATAGTGGGAC | 3 | NC | NC | NC |
| 4350 | 7190 | TCTTAATTCTGATAGTGGGA | 2 | NC | NC | NC |
| 4351 | 7191 | GTCTTAATTCTGATAGTGGG | 2 | NC | NC | NC |
| 4352 | 7192 | AGTCTTAATTCTGATAGTGG | 1 | NC | NC | NC |
| 4353 | 7193 | TAGTCTTAATTCTGATAGTG | 1 | NC | NC | NC |
| 4354 | 7194 | CTAGTCTTAATTCTGATAGT | 2 | NC | NC | NC |
| 4355 | 7195 | TCTAGTCTTAATTCTGATAG | 2 | NC | NC | NC |
| 4356 | 7196 | CTCTAGTCTTAATTCTGATA | 2 | NC | NC | NC |
| 4357 | 7197 | TCTCTAGTCTTAATTCTGAT | 2 | NC | NC | NC |
| 4358 | 7198 | ATCTCTAGTCTTAATTCTGA | 2 | NC | NC | NC |
| 4359 | 7199 | CATCTCTAGTCTTAATTCTG | 2 | NC | NC | NC |
| 4360 | 7200 | CCATCTCTAGTCTTAATTCT | 2 | NC | NC | NC |
| 4361 | 7201 | ACCATCTCTAGTCTTAATTC | 2 | NC | NC | NC |
| 4362 | 7202 | TACCATCTCTAGTCTTAATT | 2 | NC | NC | NC |
| 4363 | 7203 | TTACCATCTCTAGTCTTAAT | 2 | NC | NC | NC |
| 4364 | 7204 | ATTACCATCTCTAGTCTTAA | 1 | NC | NC | NC |
| 4365 | 7205 | TATTACCATCTCTAGTCTTA | 1 | NC | NC | NC |
| 4366 | 7206 | CTATTACCATCTCTAGTCTT | 1 | NC | NC | NC |
| 4367 | 7207 | CCTATTACCATCTCTAGTCT | 2 | NC | NC | NC |
| 4368 | 7208 | TCCTATTACCATCTCTAGTC | 2 | NC | NC | NC |
| 4369 | 7209 | CTCCTATTACCATCTCTAGT | 2 | NC | NC | NC |
| 4370 | 7210 | GCTCCTATTACCATCTCTAG | 2 | NC | NC | NC |
| 4371 | 7211 | AGCTCCTATTACCATCTCTA | 2 | NC | NC | NC |
| 4372 | 7212 | TAGCTCCTATTACCATCTCT | 1 | NC | NC | NC |
| 4373 | 7213 | CTAGCTCCTATTACCATCTC | 2 | NC | NC | NC |
| 4374 | 7214 | ACTAGCTCCTATTACCATCT | 2 | NC | NC | NC |
| 4375 | 7215 | TACTAGCTCCTATTACCATC | 2 | NC | NC | NC |
| 4376 | 7216 | ATACTAGCTCCTATTACCAT | 2 | NC | NC | NC |
| 4377 | 7217 | GATACTAGCTCCTATTACCA | 2 | NC | NC | NC |
| 4378 | 7218 | TGATACTAGCTCCTATTACC | 2 | NC | NC | NC |
| 4379 | 7219 | CTGATACTAGCTCCTATTAC | 2 | NC | NC | NC |
| 4380 | 7220 | TCTGATACTAGCTCCTATTA | 2 | NC | NC | NC |
| 4381 | 7221 | TTCTGATACTAGCTCCTATT | 1 | NC | NC | NC |
| 4382 | 7222 | TTTCTGATACTAGCTCCTAT | 2 | NC | NC | NC |
| 4383 | 7223 | TTTTCTGATACTAGCTCCTA | 2 | NC | NC | NC |
| 4384 | 7224 | CTTTTCTGATACTAGCTCCT | 2 | NC | NC | NC |
| 4385 | 7225 | GCTTTTCTGATACTAGCTCC | 2 | NC | NC | NC |
| 4386 | 7226 | AGCTTTTCTGATACTAGCTC | 2 | NC | NC | NC |
| 4387 | 7228 | TAAGCTTTTCTGATACTAGC | 2 | NC | NC | NC |
| 4388 | 7229 | TTAAGCTTTTCTGATACTAG | 1 | NC | NC | NC |
| 4389 | 7230 | CTTAAGCTTTTCTGATACTA | 1 | NC | NC | NC |
| 4390 | 7231 | CCTTAAGCTTTTCTGATACT | 2 | NC | NC | NC |
| 4391 | 7244 | ACTTTATGCTTTGCCTTAAG | 2 | NC | NC | NC |
| 4392 | 7245 | CACTTTATGCTTTGCCTTAA | 1 | NC | NC | NC |
| 4393 | 7246 | ACACTTTATGCTTTGCCTTA | 1 | NC | NC | NC |
| 4394 | 7247 | TACACTTTATGCTTTGCCTT | 2 | NC | NC | NC |
| 4395 | 7248 | CTACACTTTATGCTTTGCCT | 2 | NC | NC | NC |
| 4396 | 7249 | CCTACACTTTATGCTTTGCC | 2 | NC | NC | NC |
| 4397 | 7250 | GCCTACACTTTATGCTTTGC | 2 | NC | NC | NC |
| 4398 | 7251 | AGCCTACACTTTATGCTTTG | 2 | NC | NC | NC |
| 4399 | 7252 | TAGCCTACACTTTATGCTTT | 2 | NC | NC | NC |
| 4400 | 7253 | CTAGCCTACACTTTATGCTT | 3 | NC | NC | NC |
| 4401 | 7254 | TCTAGCCTACACTTTATGCT | 3 | NC | NC | NC |
| 4402 | 7255 | TTCTAGCCTACACTTTATGC | 2 | NC | NC | NC |
| 4403 | 7256 | ATTCTAGCCTACACTTTATG | 2 | NC | NC | NC |
| 4404 | 7257 | CATTCTAGCCTACACTTTAT | 2 | NC | NC | NC |
| 4405 | 7258 | TCATTCTAGCCTACACTTTA | 2 | NC | NC | NC |
| 4406 | 7259 | TTCATTCTAGCCTACACTTT | 2 | NC | NC | NC |
| 4407 | 7260 | CTTCATTCTAGCCTACACTT | 2 | NC | NC | NC |
| 4408 | 7261 | GCTTCATTCTAGCCTACACT | 2 | NC | NC | NC |
| 4409 | 7269 | ATTCTCCAGCTTCATTCTAG | 1 | NC | NC | NC |
| 4410 | 7270 | CATTCTCCAGCTTCATTCTA | 1 | NC | NC | NC |
| 4411 | 7271 | CCATTCTCCAGCTTCATTCT | 1 | NC | NC | NC |
| 4412 | 7272 | CCCATTCTCCAGCTTCATTC | 1 | NC | NC | NC |
| 4413 | 7273 | CCCCATTCTCCAGCTTCATT | 1 | NC | NC | NC |
| 4414 | 7274 | TCCCCATTCTCCAGCTTCAT | 1 | NC | NC | NC |
| 4415 | 7275 | CTCCCCATTCTCCAGCTTCA | 1 | NC | NC | NC |
| 4416 | 7296 | TCTGGATGTTACCCAAGCCC | 2 | NC | NC | NC |
| 4417 | 7297 | TTCTGGATGTTACCCAAGCC | 2 | NC | NC | NC |
| 4418 | 7298 | GTTCTGGATGTTACCCAAGC | 2 | NC | NC | NC |
| 4419 | 7299 | GGTTCTGGATGTTACCCAAG | 2 | NC | NC | NC |
| 4420 | 7300 | AGGTTCTGGATGTTACCCAA | 2 | NC | NC | NC |
| 4421 | 7301 | CAGGTTCTGGATGTTACCCA | 2 | NC | NC | NC |
| 4422 | 7322 | ATGTAGTTCCAGGTCCCCAG | 1 | NC | NC | NC |
| 4423 | 7323 | CATGTAGTTCCAGGTCCCCA | 2 | NC | NC | NC |
| 4424 | 7324 | TCATGTAGTTCCAGGTCCCC | 2 | NC | NC | NC |
| 4425 | 7325 | CTCATGTAGTTCCAGGTCCC | 2 | NC | NC | NC |
| 4426 | 7326 | TCTCATGTAGTTCCAGGTCC | 3 | NC | NC | NC |
| 4427 | 7327 | ATCTCATGTAGTTCCAGGTC | 2 | NC | NC | NC |
| 4428 | 7328 | CATCTCATGTAGTTCCAGGT | 2 | NC | NC | NC |
| 4429 | 7339 | CTCCATTCTTACATCTCATG | 2 | NC | NC | NC |
| 4430 | 7340 | TCTCCATTCTTACATCTCAT | 1 | NC | NC | NC |
| 4431 | 7341 | CTCTCCATTCTTACATCTCA | 1 | NC | NC | NC |
| 4432 | 7342 | CCTCTCCATTCTTACATCTC | 1 | NC | NC | NC |
| 4433 | 7343 | ACCTCTCCATTCTTACATCT | 1 | NC | NC | NC |
| 4434 | 7344 | AACCTCTCCATTCTTACATC | 1 | NC | NC | NC |
| 4435 | 7345 | GAACCTCTCCATTCTTACAT | 0 | NC | NC | NC |
| 4436 | 7346 | AGAACCTCTCCATTCTTACA | 0 | NC | NC | NC |
| 4437 | 7347 | TAGAACCTCTCCATTCTTAC | 1 | NC | NC | NC |
| 4438 | 7348 | CTAGAACCTCTCCATTCTTA | 1 | NC | NC | NC |
| 4439 | 7349 | GCTAGAACCTCTCCATTCTT | 1 | NC | NC | NC |
| 4440 | 7351 | CTGCTAGAACCTCTCCATTC | 2 | NC | NC | NC |
| 4441 | 7352 | ACTGCTAGAACCTCTCCATT | 2 | NC | NC | NC |
| 4442 | 7353 | GACTGCTAGAACCTCTCCAT | 3 | NC | NC | NC |
| 4443 | 7354 | TGACTGCTAGAACCTCTCCA | 2 | NC | NC | NC |
| 4444 | 7355 | CTGACTGCTAGAACCTCTCC | 2 | NC | NC | NC |
| 4445 | 7356 | TCTGACTGCTAGAACCTCTC | 2 | NC | NC | NC |
| 4446 | 7357 | CTCTGACTGCTAGAACCTCT | 2 | NC | NC | NC |
| 4447 | 7358 | CCTCTGACTGCTAGAACCTC | 2 | NC | NC | NC |
| 4448 | 7359 | ACCTCTGACTGCTAGAACCT | 2 | NC | NC | NC |
| 4449 | 7360 | GACCTCTGACTGCTAGAACC | 2 | NC | NC | NC |
| 4450 | 7361 | TGACCTCTGACTGCTAGAAC | 2 | NC | NC | NC |
| 4451 | 7362 | CTGACCTCTGACTGCTAGAA | 1 | NC | NC | NC |
| 4452 | 7363 | CCTGACCTCTGACTGCTAGA | 2 | NC | NC | NC |
| 4453 | 7364 | ACCTGACCTCTGACTGCTAG | 1 | NC | NC | NC |
| 4454 | 7365 | TACCTGACCTCTGACTGCTA | 2 | NC | NC | NC |
| 4455 | 7366 | GTACCTGACCTCTGACTGCT | 2 | NC | NC | NC |
| 4456 | 7367 | TGTACCTGACCTCTGACTGC | 2 | NC | NC | NC |
| 4457 | 7368 | TTGTACCTGACCTCTGACTG | 3 | NC | NC | NC |
| 4458 | 7369 | TTTGTACCTGACCTCTGACT | 2 | NC | NC | NC |
| 4459 | 7370 | ATTTGTACCTGACCTCTGAC | 2 | NC | NC | NC |
| 4460 | 7371 | CATTTGTACCTGACCTCTGA | 2 | NC | NC | NC |
| 4461 | 7372 | TCATTTGTACCTGACCTCTG | 1 | NC | NC | NC |
| 4462 | 7373 | TTCATTTGTACCTGACCTCT | 2 | NC | NC | NC |
| 4463 | 7374 | GTTCATTTGTACCTGACCTC | 2 | NC | NC | NC |
| 4464 | 7375 | TGTTCATTTGTACCTGACCT | 2 | NC | NC | NC |
| 4465 | 7376 | CTGTTCATTTGTACCTGACC | 2 | NC | NC | NC |
| 4466 | 7377 | GCTGTTCATTTGTACCTGAC | 2 | NC | NC | NC |
| 4467 | 7378 | AGCTGTTCATTTGTACCTGA | 2 | NC | NC | NC |
| 4468 | 7379 | CAGCTGTTCATTTGTACCTG | 2 | NC | NC | NC |
| 4469 | 7380 | CCAGCTGTTCATTTGTACCT | 1 | NC | NC | NC |
| 4470 | 7381 | CCCAGCTGTTCATTTGTACC | 1 | NC | NC | NC |
| 4471 | 7382 | TCCCAGCTGTTCATTTGTAC | 1 | NC | NC | NC |
| 4472 | 7383 | ATCCCAGCTGTTCATTTGTA | 1 | NC | NC | NC |
| 4473 | 7384 | GATCCCAGCTGTTCATTTGT | 2 | NC | NC | NC |
| 4474 | 7385 | AGATCCCAGCTGTTCATTTG | 2 | NC | NC | NC |
| 4475 | 7386 | CAGATCCCAGCTGTTCATTT | 2 | NC | NC | NC |
| 4476 | 7387 | GCAGATCCCAGCTGTTCATT | 2 | NC | NC | NC |
| 4477 | 7388 | CGCAGATCCCAGCTGTTCAT | 2 | NC | NC | NC |
| 4478 | 7391 | ATGCGCAGATCCCAGCTGTT | 2 | NC | NC | NC |
| 4479 | 7406 | TTTTCACTGTCTGCCATGCG | 2 | NC | NC | NC |
| 4480 | 7407 | TTTTTCACTGTCTGCCATGC | 1 | NC | NC | NC |
| 4481 | 7423 | TTTTGCTTGCCTGGGTTTTT | 1 | NC | NC | NC |
| 4482 | 7424 | ATTTTGCTTGCCTGGGTTTT | 1 | NC | NC | NC |
| 4483 | 7425 | CATTTTGCTTGCCTGGGTTT | 2 | NC | NC | NC |
| 4484 | 7426 | CCATTTTGCTTGCCTGGGTT | 2 | NC | NC | NC |
| 4485 | 7427 | ACCATTTTGCTTGCCTGGGT | 2 | NC | NC | NC |
| 4486 | 7428 | GACCATTTTGCTTGCCTGGG | 2 | NC | NC | NC |
| 4487 | 7429 | TGACCATTTTGCTTGCCTGG | 1 | NC | NC | NC |
| 4488 | 7430 | CTGACCATTTTGCTTGCCTG | 2 | NC | NC | NC |
| 4489 | 7431 | TCTGACCATTTTGCTTGCCT | 1 | NC | NC | NC |
| 4490 | 7432 | CTCTGACCATTTTGCTTGCC | 1 | NC | NC | NC |
| 4491 | 7433 | GCTCTGACCATTTTGCTTGC | 2 | NC | NC | NC |
| 4492 | 7434 | TGCTCTGACCATTTTGCTTG | 2 | NC | NC | NC |
| 4493 | 7435 | CTGCTCTGACCATTTTGCTT | 2 | NC | NC | NC |
| 4494 | 7436 | TCTGCTCTGACCATTTTGCT | 2 | NC | NC | NC |
| 4495 | 7437 | TTCTGCTCTGACCATTTTGC | 2 | NC | NC | NC |
| 4496 | 7438 | TTTCTGCTCTGACCATTTTG | 2 | NC | NC | NC |
| 4497 | 7439 | CTTTCTGCTCTGACCATTTT | 2 | NC | NC | NC |
| 4498 | 7440 | CCTTTCTGCTCTGACCATTT | 2 | NC | NC | NC |
| 4499 | 7441 | CCCTTTCTGCTCTGACCATT | 2 | NC | NC | NC |
| 4500 | 7442 | CCCCTTTCTGCTCTGACCAT | 2 | NC | NC | NC |
| 4501 | 7465 | CATCTCAAGAACGTGGCCTT | 1 | NC | NC | NC |
| 4502 | 7466 | ACATCTCAAGAACGTGGCCT | 2 | NC | NC | NC |
| 4503 | 7467 | CACATCTCAAGAACGTGGCC | 3 | NC | NC | NC |
| 4504 | 7470 | CTCCACATCTCAAGAACGTG | 2 | NC | NC | NC |
| 4505 | 7471 | CCTCCACATCTCAAGAACGT | 2 | NC | NC | NC |
| 4506 | 7472 | CCCTCCACATCTCAAGAACG | 1 | NC | NC | NC |
| 4507 | 7473 | CCCCTCCACATCTCAAGAAC | 2 | NC | NC | NC |
| 4508 | 7474 | CCCCCTCCACATCTCAAGAA | 1 | NC | NC | NC |
| 4509 | 7495 | TACTTGGCGTGGCTTCCTCA | 2 | NC | NC | NC |
| 4510 | 7496 | TTACTTGGCGTGGCTTCCTC | 2 | NC | NC | NC |
| 4511 | 7497 | CTTACTTGGCGTGGCTTCCT | 2 | NC | NC | NC |
| 4512 | 7499 | TCCTTACTTGGCGTGGCTTC | 3 | NC | NC | NC |
| 4513 | 7500 | GTCCTTACTTGGCGTGGCTT | 3 | NC | NC | NC |
| 4514 | 7501 | TGTCCTTACTTGGCGTGGCT | 2 | NC | NC | NC |
| 4515 | 7503 | TCTGTCCTTACTTGGCGTGG | 2 | NC | NC | NC |
| 4516 | 7504 | ATCTGTCCTTACTTGGCGTG | 3 | NC | NC | NC |
| 4517 | 7505 | CATCTGTCCTTACTTGGCGT | 3 | NC | NC | NC |
| 4518 | 7506 | GCATCTGTCCTTACTTGGCG | 2 | NC | NC | NC |
| 4519 | 7507 | TGCATCTGTCCTTACTTGGC | 2 | NC | NC | NC |
| 4520 | 7508 | CTGCATCTGTCCTTACTTGG | 2 | NC | NC | NC |
| 4521 | 7509 | GCTGCATCTGTCCTTACTTG | 2 | NC | NC | NC |
| 4522 | 7510 | AGCTGCATCTGTCCTTACTT | 2 | NC | NC | NC |
| 4523 | 7511 | GAGCTGCATCTGTCCTTACT | 1 | NC | NC | NC |
| 4524 | 7512 | TGAGCTGCATCTGTCCTTAC | 2 | NC | NC | NC |
| 4525 | 7513 | CTGAGCTGCATCTGTCCTTA | 2 | NC | NC | NC |
| 4526 | 7514 | GCTGAGCTGCATCTGTCCTT | 2 | NC | NC | NC |
| 4527 | 7515 | TGCTGAGCTGCATCTGTCCT | 1 | NC | NC | NC |
| 4528 | 7536 | TTGTCAGGGCTCGCTAGGAA | 3 | NC | NC | NC |
| 4529 | 7586 | ACTCCACTGTGCCATGACTG | 2 | NC | NC | NC |
| 4530 | 7587 | CACTCCACTGTGCCATGACT | 2 | NC | NC | NC |
| 4531 | 7588 | TCACTCCACTGTGCCATGAC | 2 | NC | NC | NC |
| 4532 | 7589 | TTCACTCCACTGTGCCATGA | 2 | NC | NC | NC |
| 4533 | 7590 | CTTCACTCCACTGTGCCATG | 2 | NC | NC | NC |
| 4534 | 7591 | CCTTCACTCCACTGTGCCAT | 1 | NC | NC | NC |
| 4535 | 7592 | TCCTTCACTCCACTGTGCCA | 1 | NC | NC | NC |
| 4536 | 7593 | TTCCTTCACTCCACTGTGCC | 1 | NC | NC | NC |
| 4537 | 7594 | CTTCCTTCACTCCACTGTGC | 2 | NC | NC | NC |
| 4538 | 7596 | CTCTTCCTTCACTCCACTGT | 1 | NC | NC | NC |
| 4539 | 7597 | GCTCTTCCTTCACTCCACTG | 2 | NC | NC | NC |
| 4540 | 7598 | TGCTCTTCCTTCACTCCACT | 1 | NC | NC | NC |
| 4541 | 7599 | CTGCTCTTCCTTCACTCCAC | 1 | NC | NC | NC |
| 4542 | 7600 | ACTGCTCTTCCTTCACTCCA | 1 | NC | NC | NC |
| 4543 | 7601 | AACTGCTCTTCCTTCACTCC | 2 | NC | NC | NC |
| 4544 | 7602 | AAACTGCTCTTCCTTCACTC | 1 | NC | NC | NC |
| 4545 | 7603 | GAAACTGCTCTTCCTTCACT | 2 | NC | NC | NC |
| 4546 | 7604 | TGAAACTGCTCTTCCTTCAC | 2 | NC | NC | NC |
| 4547 | 7605 | CTGAAACTGCTCTTCCTTCA | 1 | NC | NC | NC |
| 4548 | 7606 | CCTGAAACTGCTCTTCCTTC | 1 | NC | NC | NC |
| 4549 | 7607 | GCCTGAAACTGCTCTTCCTT | 0 | NC | NC | NC |
| 4550 | 7608 | TGCCTGAAACTGCTCTTCCT | 0 | NC | NC | NC |
| 4551 | 7609 | GTGCCTGAAACTGCTCTTCC | 0 | NC | NC | NC |
| 4552 | 7610 | GGTGCCTGAAACTGCTCTTC | 1 | NC | NC | NC |
| 4553 | 7611 | GGGTGCCTGAAACTGCTCTT | 2 | NC | NC | NC |
| 4554 | 7612 | TGGGTGCCTGAAACTGCTCT | 2 | NC | NC | NC |
| 4555 | 7613 | TTGGGTGCCTGAAACTGCTC | 2 | NC | NC | NC |
| 4556 | 7614 | TTTGGGTGCCTGAAACTGCT | 2 | NC | NC | NC |
| 4557 | 7615 | TTTTGGGTGCCTGAAACTGC | 2 | NC | NC | NC |
| 4558 | 7616 | GTTTTGGGTGCCTGAAACTG | 2 | NC | NC | NC |
| 4559 | 7617 | GGTTTTGGGTGCCTGAAACT | 2 | NC | NC | NC |
| 4560 | 7618 | AGGTTTTGGGTGCCTGAAAC | 2 | NC | NC | NC |
| 4561 | 7643 | AGGTGGAAAACAGGTCGTGG | 2 | NC | NC | NC |
| 4562 | 7644 | CAGGTGGAAAACAGGTCGTG | 2 | NC | NC | NC |
| 4563 | 7645 | TCAGGTGGAAAACAGGTCGT | 2 | NC | NC | NC |
| 4564 | 7646 | TTCAGGTGGAAAACAGGTCG | 2 | NC | NC | NC |
| 4565 | 7647 | CTTCAGGTGGAAAACAGGTC | 2 | NC | NC | NC |
| 4566 | 7648 | TCTTCAGGTGGAAAACAGGT | 2 | NC | NC | NC |
| 4567 | 7649 | CTCTTCAGGTGGAAAACAGG | 2 | NC | NC | NC |
| 4568 | 7650 | GCTCTTCAGGTGGAAAACAG | 2 | NC | NC | NC |
| 4569 | 7651 | GGCTCTTCAGGTGGAAAACA | 2 | NC | NC | NC |
| 4570 | 7652 | TGGCTCTTCAGGTGGAAAAC | 2 | NC | NC | NC |
| 4571 | 7653 | GTGGCTCTTCAGGTGGAAAA | 2 | NC | NC | NC |
| 4572 | 7654 | GGTGGCTCTTCAGGTGGAAA | 2 | NC | NC | NC |
| 4573 | 7658 | AATGGGTGGCTCTTCAGGTG | 2 | NC | NC | NC |
| 4574 | 7659 | GAATGGGTGGCTCTTCAGGT | 2 | NC | NC | NC |
| 4575 | 7661 | TGGAATGGGTGGCTCTTCAG | 2 | NC | NC | NC |
| 4576 | 7662 | ATGGAATGGGTGGCTCTTCA | 2 | NC | NC | NC |
| 4577 | 7663 | GATGGAATGGGTGGCTCTTC | 2 | NC | NC | NC |
| 4578 | 7664 | GGATGGAATGGGTGGCTCTT | 2 | NC | NC | NC |
| 4579 | 7665 | TGGATGGAATGGGTGGCTCT | 2 | NC | NC | NC |
| 4580 | 7666 | TTGGATGGAATGGGTGGCTC | 2 | NC | NC | NC |
| 4581 | 7667 | TTTGGATGGAATGGGTGGCT | 1 | NC | NC | NC |
| 4582 | 7668 | GTTTGGATGGAATGGGTGGC | 1 | NC | NC | NC |
| 4583 | 7669 | GGTTTGGATGGAATGGGTGG | 2 | NC | NC | NC |
| 4584 | 7670 | GGGTTTGGATGGAATGGGTG | 2 | NC | NC | NC |
| 4585 | 7671 | AGGGTTTGGATGGAATGGGT | 2 | NC | NC | NC |
| 4586 | 7672 | AAGGGTTTGGATGGAATGGG | 2 | NC | NC | NC |
| 4587 | 7673 | CAAGGGTTTGGATGGAATGG | 2 | NC | NC | NC |
| 4588 | 7683 | AGACTTTTGCCAAGGGTTTG | 2 | NC | NC | NC |
| 4589 | 7684 | CAGACTTTTGCCAAGGGTTT | 2 | NC | NC | NC |
| 4590 | 7685 | GCAGACTTTTGCCAAGGGTT | 2 | NC | NC | NC |
| 4591 | 7702 | GCCGGTTCTCTCTGTTAGCA | 2 | NC | NC | NC |
| 4592 | 7704 | TGGCCGGTTCTCTCTGTTAG | 2 | NC | NC | NC |
| 4593 | 7705 | CTGGCCGGTTCTCTCTGTTA | 2 | NC | NC | NC |
| 4594 | 7706 | ACTGGCCGGTTCTCTCTGTT | 1 | NC | NC | NC |
| 4595 | 7707 | TACTGGCCGGTTCTCTCTGT | 2 | NC | NC | NC |
| 4596 | 7708 | ATACTGGCCGGTTCTCTCTG | 1 | NC | NC | NC |
| 4597 | 7709 | CATACTGGCCGGTTCTCTCT | 1 | NC | NC | NC |
| 4598 | 7711 | AGCATACTGGCCGGTTCTCT | 2 | NC | NC | NC |
| 4599 | 7735 | AGACAGGCATGATCGCGACT | 3 | NC | NC | NC |
| 4600 | 7736 | AAGACAGGCATGATCGCGAC | 3 | NC | NC | NC |
| 4601 | 7737 | AAAGACAGGCATGATCGCGA | 2 | NC | NC | NC |
| 4602 | 7738 | TAAAGACAGGCATGATCGCG | 2 | NC | NC | NC |
| 4603 | 7739 | GTAAAGACAGGCATGATCGC | 2 | NC | NC | NC |
| 4604 | 7740 | GGTAAAGACAGGCATGATCG | 2 | NC | NC | NC |
| 4605 | 7741 | GGGTAAAGACAGGCATGATC | 2 | NC | NC | NC |
| 4606 | 7742 | AGGGTAAAGACAGGCATGAT | 2 | NC | NC | NC |
| 4607 | 7743 | GAGGGTAAAGACAGGCATGA | 1 | NC | NC | NC |
| 4608 | 7744 | AGAGGGTAAAGACAGGCATG | 1 | NC | NC | NC |
| 4609 | 7745 | TAGAGGGTAAAGACAGGCAT | 1 | NC | NC | NC |
| 4610 | 7746 | TTAGAGGGTAAAGACAGGCA | 1 | NC | NC | NC |
| 4611 | 7747 | CTTAGAGGGTAAAGACAGGC | 2 | NC | NC | NC |
| 4612 | 7748 | GCTTAGAGGGTAAAGACAGG | 2 | NC | NC | NC |
| 4613 | 7749 | AGCTTAGAGGGTAAAGACAG | 2 | NC | NC | NC |
| 4614 | 7750 | CAGCTTAGAGGGTAAAGACA | 2 | NC | NC | NC |
| 4615 | 7751 | TCAGCTTAGAGGGTAAAGAC | 2 | NC | NC | NC |
| 4616 | 7752 | TTCAGCTTAGAGGGTAAAGA | 2 | NC | NC | NC |
| 4617 | 7753 | CTTCAGCTTAGAGGGTAAAG | 1 | NC | NC | NC |
| 4618 | 7767 | CCGTTGATGAGCAGCTTCAG | 2 | NC | NC | NC |
| 4619 | 7768 | ACCGTTGATGAGCAGCTTCA | 2 | NC | NC | NC |
| 4620 | 7769 | CACCGTTGATGAGCAGCTTC | 2 | NC | NC | NC |
| 4621 | 7770 | TCACCGTTGATGAGCAGCTT | 2 | NC | NC | NC |
| 4622 | 7771 | CTCACCGTTGATGAGCAGCT | 2 | NC | NC | NC |
| 4623 | 7779 | TTTGCCATCTCACCGTTGAT | 2 | NC | NC | NC |
| 4624 | 7780 | TTTTGCCATCTCACCGTTGA | 3 | NC | NC | NC |
| 4625 | 7781 | TTTTTGCCATCTCACCGTTG | 3 | NC | NC | NC |
| 4626 | 7782 | CTTTTTGCCATCTCACCGTT | 2 | NC | NC | NC |
| 4627 | 7783 | CCTTTTTGCCATCTCACCGT | 2 | NC | NC | NC |
| 4628 | 7784 | ACCTTTTTGCCATCTCACCG | 2 | NC | NC | NC |
| 4629 | 7785 | CACCTTTTTGCCATCTCACC | 1 | NC | NC | NC |
| 4630 | 7786 | CCACCTTTTTGCCATCTCAC | 2 | NC | NC | NC |
| 4631 | 7787 | CCCACCTTTTTGCCATCTCA | 2 | NC | NC | NC |
| 4632 | 7788 | ACCCACCTTTTTGCCATCTC | 2 | NC | NC | NC |
| 4633 | 7789 | GACCCACCTTTTTGCCATCT | 2 | NC | NC | NC |
| 4634 | 7790 | GGACCCACCTTTTTGCCATC | 3 | NC | NC | NC |
| 4635 | 7803 | TTTCCCCTCTTCTGGACCCA | 1 | NC | NC | NC |
| 4636 | 7804 | TTTTCCCCTCTTCTGGACCC | 1 | NC | NC | NC |
| 4637 | 7805 | CTTTTCCCCTCTTCTGGACC | 1 | NC | NC | NC |
| 4638 | 7806 | TCTTTTCCCCTCTTCTGGAC | 1 | NC | NC | NC |
| 4639 | 7807 | TTCTTTTCCCCTCTTCTGGA | 1 | NC | NC | NC |
| 4640 | 7808 | CTTCTTTTCCCCTCTTCTGG | 1 | NC | NC | NC |
| 4641 | 7809 | CCTTCTTTTCCCCTCTTCTG | 1 | NC | NC | NC |
| 4642 | 7810 | CCCTTCTTTTCCCCTCTTCT | 1 | NC | NC | NC |
| 4643 | 7811 | TCCCTTCTTTTCCCCTCTTC | 1 | NC | NC | NC |
| 4644 | 7812 | CTCCCTTCTTTTCCCCTCTT | 1 | NC | NC | NC |
| 4645 | 7813 | ACTCCCTTCTTTTCCCCTCT | 1 | NC | NC | NC |
| 4646 | 7814 | GACTCCCTTCTTTTCCCCTC | 1 | NC | NC | NC |
| 4647 | 7815 | AGACTCCCTTCTTTTCCCCT | 1 | NC | NC | NC |
| 4648 | 7816 | CAGACTCCCTTCTTTTCCCC | 1 | NC | NC | NC |
| 4649 | 7817 | ACAGACTCCCTTCTTTTCCC | 2 | NC | NC | NC |
| 4650 | 7818 | CACAGACTCCCTTCTTTTCC | 2 | NC | NC | NC |
| 4651 | 7819 | TCACAGACTCCCTTCTTTTC | 2 | NC | NC | NC |
| 4652 | 7820 | TTCACAGACTCCCTTCTTTT | 2 | NC | NC | NC |
| 4653 | 7821 | TTTCACAGACTCCCTTCTTT | 2 | NC | NC | NC |
| 4654 | 7822 | TTTTCACAGACTCCCTTCTT | 2 | NC | NC | NC |
| 4655 | 7823 | GTTTTCACAGACTCCCTTCT | 2 | NC | NC | NC |
| 4656 | 7824 | TGTTTTCACAGACTCCCTTC | 2 | NC | NC | NC |
| 4657 | 7825 | TTGTTTTCACAGACTCCCTT | 1 | NC | NC | NC |
| 4658 | 7826 | TTTGTTTTCACAGACTCCCT | 2 | NC | NC | NC |
| 4659 | 7827 | TTTTGTTTTCACAGACTCCC | 1 | NC | NC | NC |
| 4660 | 7828 | ATTTTGTTTTCACAGACTCC | 1 | NC | NC | NC |
| 4661 | 7829 | CATTTTGTTTTCACAGACTC | 1 | NC | NC | NC |
| 4662 | 7830 | GCATTTTGTTTTCACAGACT | 2 | NC | NC | NC |
| 4663 | 7831 | AGCATTTTGTTTTCACAGAC | 2 | NC | NC | NC |
| 4664 | 7832 | CAGCATTTTGTTTTCACAGA | 2 | NC | NC | NC |
| 4665 | 7833 | TCAGCATTTTGTTTTCACAG | 2 | NC | NC | NC |
| 4666 | 7834 | TTCAGCATTTTGTTTTCACA | 1 | NC | NC | NC |
| 4667 | 7835 | CTTCAGCATTTTGTTTTCAC | 1 | NC | NC | NC |
| 4668 | 7836 | TCTTCAGCATTTTGTTTTCA | 1 | NC | NC | NC |
| 4669 | 7837 | TTCTTCAGCATTTTGTTTTC | 1 | NC | NC | NC |
| 4670 | 7838 | ATTCTTCAGCATTTTGTTTT | 1 | NC | NC | NC |
| 4671 | 7839 | GATTCTTCAGCATTTTGTTT | 1 | NC | NC | NC |
| 4672 | 7840 | AGATTCTTCAGCATTTTGTT | 1 | NC | NC | NC |
| 4673 | 7841 | CAGATTCTTCAGCATTTTGT | 1 | NC | NC | NC |
| 4674 | 7842 | GCAGATTCTTCAGCATTTTG | 2 | NC | NC | NC |
| 4675 | 7843 | TGCAGATTCTTCAGCATTTT | 1 | NC | NC | NC |
| 4676 | 7848 | TTTGATGCAGATTCTTCAGC | 2 | NC | NC | NC |
| 4677 | 7849 | ATTTGATGCAGATTCTTCAG | 2 | NC | NC | NC |
| 4678 | 7850 | TATTTGATGCAGATTCTTCA | 1 | NC | NC | NC |
| 4679 | 7851 | TTATTTGATGCAGATTCTTC | 1 | NC | NC | NC |
| 4680 | 7852 | TTTATTTGATGCAGATTCTT | 1 | NC | NC | NC |
| 4681 | 7853 | GTTTATTTGATGCAGATTCT | 2 | NC | NC | NC |
| 4682 | 7854 | GGTTTATTTGATGCAGATTC | 2 | NC | NC | NC |
| 4683 | 7855 | GGGTTTATTTGATGCAGATT | 2 | NC | NC | NC |
| 4684 | 7856 | AGGGTTTATTTGATGCAGAT | 2 | NC | NC | NC |
| 4685 | 7857 | AAGGGTTTATTTGATGCAGA | 1 | NC | NC | NC |
| 4686 | 7858 | GAAGGGTTTATTTGATGCAG | 2 | NC | NC | NC |
| 4687 | 7859 | GGAAGGGTTTATTTGATGCA | 2 | NC | NC | NC |
| 4688 | 7860 | AGGAAGGGTTTATTTGATGC | 2 | NC | NC | NC |
| 4689 | 7861 | AAGGAAGGGTTTATTTGATG | 2 | NC | NC | NC |
| 4690 | 7862 | GAAGGAAGGGTTTATTTGAT | 2 | NC | NC | NC |
| 4691 | 7863 | GGAAGGAAGGGTTTATTTGA | 2 | NC | NC | NC |
| 4692 | 7864 | AGGAAGGAAGGGTTTATTTG | 2 | NC | NC | NC |
| 4693 | 7865 | AAGGAAGGAAGGGTTTATTT | 1 | NC | NC | NC |
| 4694 | 7866 | GAAGGAAGGAAGGGTTTATT | 1 | NC | NC | NC |
| 4695 | 7867 | GGAAGGAAGGAAGGGTTTAT | 1 | NC | NC | NC |
| 4696 | 7868 | AGGAAGGAAGGAAGGGTTTA | 0 | NC | NC | NC |
| 4697 | 7869 | AAGGAAGGAAGGAAGGGTTT | 0 | NC | NC | NC |
| 4698 | 7870 | AAAGGAAGGAAGGAAGGGTT | 1 | NC | NC | NC |
| 4699 | 7871 | AAAAGGAAGGAAGGAAGGGT | 0 | NC | NC | NC |
| 4700 | 7872 | AAAAAGGAAGGAAGGAAGGG | 0 | NC | NC | NC |
| 4701 | 7873 | GAAAAAGGAAGGAAGGAAGG | 0 | NC | NC | NC |
| 4702 | 7874 | GGAAAAAGGAAGGAAGGAAG | 0 | NC | NC | NC |
| 4703 | 7875 | AGGAAAAAGGAAGGAAGGAA | 0 | NC | NC | NC |
| 4704 | 7876 | AAGGAAAAAGGAAGGAAGGA | 0 | NC | NC | NC |
| 4705 | 7877 | GAAGGAAAAAGGAAGGAAGG | 0 | NC | NC | NC |
| 4706 | 7878 | TGAAGGAAAAAGGAAGGAAG | 1 | NC | NC | NC |
| 4707 | 7879 | TTGAAGGAAAAAGGAAGGAA | 1 | NC | NC | NC |
| 4708 | 7880 | TTTGAAGGAAAAAGGAAGGA | 1 | NC | NC | NC |
| 4709 | 7881 | TTTTGAAGGAAAAAGGAAGG | 1 | NC | NC | NC |
| 4710 | 7882 | TTTTTGAAGGAAAAAGGAAG | 1 | NC | NC | NC |

### Example 2. Antisense Inhibition of MLH3

[0332] Inhibition or knockdown of MLH3 can be demonstrated using a cell-based assay. For example, HEK293, NIH3T3, or Hela or another available mammalian cell line with oligonucleotides targeting MLH3 identified above in Example 1 using at least five different dose levels, using transfection reagents such as Lipofectamine 2000 (Invitrogen) following the manufacturer's instructions. Cells are harvested at multiple time points up to 7 days post transfection for either mRNA or protein analyses. Knockdown of mRNA and protein are determined by RT-qPCR or western blot analyses respectively, using standard molecular biology techniques as previously described (see, for example, as described in Drouet et al., 2014, PLOS One 9(6): e99341). The relative levels of the MLH3 mRNA and protein at the different oligonucleotide levels are compared with a mock oligonucleotide control. The most potent oligonucleotides (for example, those which are capable of at least 90%, at least 95%, at least 97%, at least 98%, or at least 99% or more, reduction in protein levels when compared with controls) are selected for subsequent studies, for example, as described in the examples below.

[0333] Human Cell Lines

[0334] HeLa cells were obtained from ATCC (ATCC in partnership with LGC Standards, Wesel, Germany, cat. #ATCC-CRM-CCL-2) and cultured in HAM's F12 (#FG0815, Biochrom, Berlin, Germany), supplemented to contain 10% fetal calf serum (1248D, Biochrom GmbH, Berlin, Germany), and 100 U/ml Penicillin/100 μg/ml Streptomycin (A2213, Biochrom GmbH, Berlin, Germany) at 37° C. in an atmosphere with 5% CO₂ in a humidified incubator. For transfection of HeLa cells with ASOs, cells were seeded at a density of 15,000 cells/well into 96-well tissue culture plates (#655180, GBO, Germany).

[0335] Transfections

[0336] In HeLa cells, transfection of ASOs was carried out with Lipofectamine 2000 (Invitrogen/Life Technologies, Karlsruhe, Germany) according to manufacturer's instructions for reverse transfection with 0.25 μL Lipofectamine 2000 per well.

[0337] The dual dose screen was performed with ASOs in quadruplicates at 20 nM and 2 nM respectively, with two ASOs targeting AHSA1 (one MOE-ASO and one 2′oMe-ASO) as unspecific controls and a mock transfection. Dose-response experiments were done with ASOs in 5 concentrations transfected in quadruplicates, starting at 20 nM in 5-6-fold dilutions steps down to ˜15-32 pM. Mock transfected cells served as control in dose-response curve (DRC) experiments.

[0338] Analysis and Quantitation

[0339] After 24 h of incubation with ASOs, medium was removed and cells were lysed in 150μl Medium-Lysis Mixture (1 volume lysis mixture, 2 volumes cell culture medium) and then incubated at 53° C. for 30 minutes. bDNA assay was performed according to manufacturer's instructions. Luminescence was read using 1420 Luminescence Counter (WALLAC VICTOR Light, Perkin Elmer, Rodgau-Jugesheim, Germany) following 30 minutes incubation at RT in the dark.

[0340] The two Ahsa1-ASOs (one 2′-OMe and one MOE-modified) served at the same time as unspecific controls for respective target mRNA expression and as a positive control to analyze transfection efficiency with regards to Ahsa1 mRNA level. By hybridization with an Ahsa1 probeset, the mock transfected wells served as controls for Ahsa1 mRNA level. Transfection efficiency for each 96-well plate and both doses in the dual dose screen were calculated by relating Ahsa1-level with Ahsa1-ASO (normalized to GapDH) to Ahsa1-level obtained with mock controls.

[0341] For each well, the target mRNA level was normalized to the respective GAPDH mRNA level. The activity of a given ASO was expressed as percent mRNA concentration of the respective target (normalized to GAPDH mRNA) in treated cells, relative to the target mRNA concentration (normalized to GAPDH mRNA) averaged across control wells.

[0342] The results of the dual-dose screen of ˜480 ASOs targeting MLH3, as well as IC₂₀, IC₅₀ and IC₈₀ values of approximately 48 positive ASOs from the dual dose screen, are shown in Table 3.

TABLE 3
Positive ASOs

| SEQ | | | | | | | mean % mRNA | | SD % mRNA | | | | |
|---|---|---|---|---|---|---|---|---|---|---|---|---|---|
| ID | Posi- | | Off-target Score | | | | remaining | | remaining | | IC20 | IC50 | IC80 |
| NO | tion | Sequence | Human | Cyno | Mouse | Rat | 2 nM | 20 nM | 2 nM | 20 nM | (nM) | (nM) | (nM) |
| 89 | 224 | TACTTCAACTG | 2 | 2 | NC | NC | 74.75 | 16.41 | 5.11 | 1.90 | NA | NA | NA |
| | | ACAAGCACT | | | | | | | | | | | |
| 90 | 225 | GTACTTCAACT | 2 | 2 | NC | NC | 77.73 | 52.54 | 2.17 | 2.02 | NA | NA | NA |
| | | GACAAGCAC | | | | | | | | | | | |
| 92 | 227 | TTGTACTTCAA | 2 | 2 | NC | NC | 75.57 | 30.32 | 5.23 | 1.51 | NA | NA | NA |
| | | CTGACAAGC | | | | | | | | | | | |
| 101 | 237 | GCAATTTGGC | 2 | 2 | NC | NC | 77.37 | 64.88 | 5.04 | 9.95 | NA | NA | NA |
| | | TTGTACTTCA | | | | | | | | | | | |
| 102 | 238 | CGCAATTTGG | 2 | 3 | NC | NC | 71.59 | 15.63 | 3.42 | 1.01 | NA | NA | NA |
| | | CTTGTACTTC | | | | | | | | | | | |
| 103 | 239 | ACGCAATTTG | 2 | 3 | NC | NC | 72.11 | 60.32 | 3.42 | 7.53 | NA | NA | NA |
| | | GCTTGTACTT | | | | | | | | | | | |
| 106 | 242 | AGAACGCAAT | 2 | 2 | NC | NC | 71.44 | 71.53 | 4.33 | 37.95 | NA | NA | NA |
| | | TTGGCTTGTA | | | | | | | | | | | |
| 107 | 243 | CAGAACGCAA | 3 | 2 | NC | NC | 66.80 | 36.49 | 5.84 | 5.28 | NA | NA | NA |
| | | TTTGGCTTGT | | | | | | | | | | | |
| 108 | 244 | CCAGAACGCA | 3 | 3 | NC | NC | 62.90 | 37.68 | 3.87 | 4.83 | NA | NA | NA |
| | | ATTTGGCTTG | | | | | | | | | | | |
| 109 | 245 | ACCAGAACGC | 3 | 2 | NC | NC | 66.82 | 98.40 | 2.36 | 16.21 | NA | NA | NA |
| | | AATTTGGCTT | | | | | | | | | | | |
| 110 | 246 | AACCAGAACG | 2 | 2 | NC | NC | 60.40 | 44.74 | 15.63 | 2.25 | NA | NA | NA |
| | | CAATTTGGCT | | | | | | | | | | | |
| 111 | 247 | AAACCAGAAC | 2 | 2 | NC | NC | 70.74 | 28.71 | 1.63 | 2.76 | NA | NA | NA |
| | | GCAATTTGGC | | | | | | | | | | | |
| 115 | 270 | ATTGGCCCAA | 2 | 2 | NC | NC | 78.95 | 45.99 | 2.10 | 2.57 | NA | NA | NA |
| | | GGAGCTTATG | | | | | | | | | | | |
| 116 | 271 | CATTGGCCCA | 2 | 3 | NC | NC | 76.12 | 28.26 | 10.83 | 1.81 | NA | NA | NA |
| | | AGGAGCTTAT | | | | | | | | | | | |
| 117 | 272 | ACATTGGCCC | 2 | 3 | NC | NC | 75.06 | 53.28 | 2.48 | 2.00 | NA | NA | NA |
| | | AAGGAGCTTA | | | | | | | | | | | |
| 133 | 288 | GGGCAAGTTC | 2 | 2 | NC | NC | 69.85 | 94.09 | 0.43 | 11.41 | NA | NA | NA |
| | | CTCAACACAT | | | | | | | | | | | |
| 134 | 289 | AGGGCAAGTT | 2 | 2 | NC | NC | 74.03 | 69.07 | 3.53 | 5.32 | NA | NA | NA |
| | | CCTCAACACA | | | | | | | | | | | |
| 135 | 296 | ACTGTTGAGG | 2 | 2 | NC | NC | 79.51 | 65.67 | 4.25 | 5.62 | NA | NA | NA |
| | | GCAAGTTCCT | | | | | | | | | | | |
| 150 | 324 | CAGCCACACA | 2 | 2 | NC | NC | 66.83 | 25.32 | 2.76 | 2.23 | NA | NA | NA |
| | | TTTTGCTTCA | | | | | | | | | | | |
| 151 | 325 | ACAGCCACAC | 2 | 2 | NC | NC | 69.96 | 72.78 | 4.30 | 4.32 | NA | NA | NA |
| | | ATTTTGCTTC | | | | | | | | | | | |
| 152 | 326 | GACAGCCACA | 2 | 2 | NC | NC | 80.79 | 113.47 | 16.94 | 5.71 | NA | NA | NA |
| | | CATTTTGCTT | | | | | | | | | | | |
| 154 | 328 | CTGACAGCCA | 2 | 2 | NC | NC | 79.02 | 26.85 | 2.20 | 3.00 | NA | NA | NA |
| | | CACATTTTGC | | | | | | | | | | | |
| 160 | 334 | TTCACCCTGA | 2 | 1 | NC | NC | 92.28 | 10.93 | 2.00 | 2.21 | NA | NA | NA |
| | | CAGCCACACA | | | | | | | | | | | |
| 161 | 335 | ATTCACCCTG | 2 | 2 | NC | NC | 83.55 | 10.33 | 5.21 | 1.56 | NA | NA | NA |
| | | ACAGCCACAC | | | | | | | | | | | |
| 163 | 337 | ATATTCACCCT | 2 | 2 | NC | NC | 87.05 | 9.72 | 2.44 | 0.70 | NA | NA | NA |
| | | GACAGCCAC | | | | | | | | | | | |
| 164 | 338 | CATATTCACC | 2 | 2 | NC | NC | 81.52 | 8.96 | 1.50 | 1.61 | 0.31 | 1.06 | 4.15 |
| | | CTGACAGCCA | | | | | | | | | | | |
| 166 | 340 | TCCATATTCAC | 2 | 2 | NC | NC | 87.79 | 9.93 | 13.96 | 0.77 | NA | NA | NA |
| | | CCTGACAGC | | | | | | | | | | | |
| 168 | 342 | TTTCCATATTC | 2 | 2 | NC | NC | 77.41 | 15.50 | 4.02 | 2.31 | NA | NA | NA |
| | | ACCCTGACA | | | | | | | | | | | |
| 170 | 344 | GGTTTCCATAT | 2 | 2 | NC | NC | 65.76 | 79.24 | 1.84 | 6.95 | NA | NA | NA |
| | | TCACCCTGA | | | | | | | | | | | |
| 174 | 358 | ACTTGAACTT | 2 | 2 | 2 | 2 | 82.04 | 114.15 | 4.85 | 4.63 | NA | NA | NA |
| | | GGAAGGTTTC | | | | | | | | | | | |
| 175 | 359 | CACTTGAACTT | 2 | 2 | 2 | 1 | 83.32 | 25.76 | 16.25 | 2.93 | NA | NA | NA |
| | | GGAAGGTTT | | | | | | | | | | | |
| 176 | 360 | TCACTTGAACT | 1 | 1 | 1 | 2 | 75.49 | 22.95 | 3.67 | 3.55 | NA | NA | NA |
| | | TGGAAGGTT | | | | | | | | | | | |
| 178 | 362 | TATCACTTGAA | 1 | 1 | 2 | 3 | 95.08 | 17.86 | 19.33 | 1.20 | NA | NA | NA |
| | | CTTGGAAGG | | | | | | | | | | | |
| 180 | 364 | TCTATCACTTG | 2 | 1 | 1 | 2 | 79.06 | 19.79 | 4.78 | 1.89 | NA | NA | NA |
| | | AACTTGGAA | | | | | | | | | | | |
| 181 | 365 | GTCTATCACTT | 2 | 1 | 1 | 2 | 77.01 | 50.90 | 0.99 | 4.78 | NA | NA | NA |
| | | GAACTTGGA | | | | | | | | | | | |
| 182 | 366 | TGTCTATCACT | 2 | 2 | 1 | 1 | 75.65 | 39.52 | 1.01 | 6.03 | NA | NA | NA |
| | | TGAACTTGG | | | | | | | | | | | |
| 183 | 367 | TTGTCTATCAC | 2 | 2 | 2 | 2 | 88.34 | 20.10 | 5.86 | 3.29 | NA | NA | NA |
| | | TTGAACTTG | | | | | | | | | | | |
| 184 | 368 | ATTGTCTATCA | 2 | 2 | 2 | NC | 84.20 | 54.98 | 1.73 | 3.67 | NA | NA | NA |
| | | CTTGAACTT | | | | | | | | | | | |
| 185 | 369 | CATTGTCTATC | 2 | 2 | 2 | NC | 95.44 | 25.25 | 17.34 | 2.84 | NA | NA | NA |
| | | ACTTGAACT | | | | | | | | | | | |
| 186 | 370 | CCATTGTCTAT | 2 | 2 | 2 | NC | 75.20 | 15.87 | 2.35 | 0.58 | 0.25 | 0.92 | 4.36 |
| | | CACTTGAAC | | | | | | | | | | | |
| 187 | 371 | TCCATTGTCTA | 2 | 2 | 2 | NC | 70.21 | 17.69 | 1.89 | 1.61 | 0.36 | 1.21 | 8.86 |
| | | TCACTTGAA | | | | | | | | | | | |
| 188 | 372 | ATCCATTGTCT | 2 | 2 | NC | NC | 73.77 | 22.51 | 1.88 | 5.13 | NA | NA | NA |
| | | ATCACTTGA | | | | | | | | | | | |
| 189 | 373 | AATCCATTGTC | 2 | 2 | NC | NC | 77.83 | 26.73 | 3.24 | 1.26 | NA | NA | NA |
| | | TATCACTTG | | | | | | | | | | | |
| 201 | 386 | ACTCCCCATC | 2 | 2 | NC | NC | 80.75 | 22.43 | 3.52 | 1.83 | NA | NA | NA |
| | | CCAAATCCAT | | | | | | | | | | | |
| 211 | 396 | CTACATCATCA | 2 | 2 | NC | NC | 77.20 | 12.74 | 2.53 | 1.37 | NA | NA | NA |
| | | CTCCCCATC | | | | | | | | | | | |
| 212 | 397 | TCTACATCATC | 2 | 2 | NC | NC | 74.42 | 12.19 | 2.00 | 0.49 | 3.10 | 11.27 | ND |
| | | ACTCCCCAT | | | | | | | | | | | |
| 229 | 414 | AACGATTTCC | 2 | 2 | NC | NC | 72.64 | 22.78 | 3.19 | 1.16 | NA | NA | NA |
| | | CACTTTCTCT | | | | | | | | | | | |
| 230 | 415 | TAACGATTTCC | 2 | 2 | NC | NC | 79.03 | 11.66 | 5.33 | 1.49 | NA | NA | NA |
| | | CACTTTCTC | | | | | | | | | | | |
| 231 | 416 | ATAACGATTTC | 2 | 2 | NC | NC | 78.95 | 14.41 | 4.83 | 4.50 | NA | NA | NA |
| | | CCACTTTCT | | | | | | | | | | | |
| 234 | 426 | TACTGGTGAA | 2 | 3 | NC | NC | 80.89 | 30.57 | 2.84 | 0.46 | NA | NA | NA |
| | | ATAACGATTT | | | | | | | | | | | |
| 235 | 427 | TTACTGGTGA | 2 | 2 | NC | NC | 65.31 | 19.49 | 5.20 | 0.84 | 0.48 | 1.36 | 4.89 |
| | | AATAACGATT | | | | | | | | | | | |
| 236 | 428 | TTTACTGGTG | 2 | 2 | NC | NC | 87.08 | 21.12 | 7.01 | 2.19 | NA | NA | NA |
| | | AAATAACGAT | | | | | | | | | | | |
| 237 | 429 | ATTTACTGGT | 2 | 2 | NC | NC | 85.92 | 41.52 | 3.99 | 1.99 | NA | NA | NA |
| | | GAAATAACGA | | | | | | | | | | | |
| 238 | 430 | CATTTACTGGT | 2 | 2 | NC | NC | 90.43 | 20.60 | 14.34 | 1.10 | NA | NA | NA |
| | | GAAATAACG | | | | | | | | | | | |
| 241 | 433 | TGGCATTTACT | 2 | 2 | NC | NC | 75.60 | 27.06 | 6.23 | 2.19 | NA | NA | NA |
| | | GGTGAAATA | | | | | | | | | | | |
| 242 | 434 | GTGGCATTTA | 2 | 1 | NC | NC | 74.62 | 65.91 | 5.68 | 4.88 | NA | NA | NA |
| | | CTGGTGAAAT | | | | | | | | | | | |
| 248 | 452 | CTCCAAGTCC | 3 | 3 | NC | NC | 66.48 | 35.79 | 2.84 | 6.63 | NA | NA | NA |
| | | TGTACCGAGT | | | | | | | | | | | |
| 249 | 453 | TCTCCAAGTC | 3 | 3 | NC | NC | 69.72 | 35.31 | 5.64 | 2.28 | NA | NA | NA |
| | | CTGTACCGAG | | | | | | | | | | | |
| 250 | 454 | TTCTCCAAGT | 2 | 3 | NC | NC | 80.09 | 15.49 | 5.44 | 1.27 | NA | NA | NA |
| | | CCTGTACCGA | | | | | | | | | | | |
| 254 | 468 | CATAAAACCTT | 2 | 1 | NC | NC | 72.14 | 15.86 | 27.20 | 0.86 | NA | NA | NA |
| | | GGATTCTCC | | | | | | | | | | | |
| 265 | 480 | CTCCTCGGAA | 2 | 2 | NC | NC | 81.92 | 20.89 | 5.26 | 2.21 | NA | NA | NA |
| | | ACCATAAAAC | | | | | | | | | | | |
| 266 | 481 | TCTCCTCGGA | 2 | 2 | NC | NC | 84.83 | 18.78 | 3.51 | 2.57 | NA | NA | NA |
| | | AACCATAAAA | | | | | | | | | | | |
| 267 | 482 | CTCTCCTCGG | 2 | 2 | NC | NC | 86.89 | 12.64 | 2.43 | 1.22 | NA | NA | NA |
| | | AAACCATAAA | | | | | | | | | | | |
| 268 | 483 | CCTCTCCTCG | 2 | 2 | NC | NC | 81.76 | 11.71 | 7.00 | 1.87 | NA | NA | NA |
| | | GAAACCATAA | | | | | | | | | | | |
| 269 | 484 | GCCTCTCCTC | 2 | 1 | NC | NC | 80.11 | 25.50 | 4.59 | 1.33 | NA | NA | NA |
| | | GGAAACCATA | | | | | | | | | | | |
| 282 | 537 | TTTTCTTGGAC | 2 | 2 | NC | NC | 86.51 | 14.81 | 2.17 | 2.33 | NA | NA | NA |
| | | GAAATTTCC | | | | | | | | | | | |
| 283 | 538 | TTTTTCTTGGA | 2 | 1 | NC | NC | 92.35 | 17.43 | 9.00 | 1.47 | NA | NA | NA |
| | | CGAAATTTC | | | | | | | | | | | |
| 284 | 539 | GTTTTTCTTGG | 2 | 2 | NC | NC | 85.97 | 63.49 | 5.37 | 2.09 | NA | NA | NA |
| | | ACGAAATTT | | | | | | | | | | | |
| 285 | 540 | TGTTTTTCTTG | 2 | 2 | NC | NC | 91.72 | 30.14 | 6.86 | 5.01 | NA | NA | NA |
| | | GACGAAATT | | | | | | | | | | | |
| 286 | 541 | CTGTTTTTCTT | 2 | 2 | NC | NC | 78.31 | 16.19 | 11.18 | 2.23 | NA | NA | NA |
| | | GGACGAAAT | | | | | | | | | | | |
| 287 | 542 | CCTGTTTTTCT | 3 | 1 | NC | NC | 72.73 | 19.56 | 4.99 | 2.01 | NA | NA | NA |
| | | TGGACGAAA | | | | | | | | | | | |
| 288 | 543 | TCCTGTTTTTC | 2 | 2 | NC | NC | 78.70 | 23.15 | 4.59 | 1.40 | NA | NA | NA |
| | | TTGGACGAA | | | | | | | | | | | |
| 294 | 552 | TTTTCATTGTC | 2 | 1 | NC | NC | 88.62 | 13.49 | 2.05 | 3.75 | NA | NA | NA |
| | | CTGTTTTTC | | | | | | | | | | | |
| 296 | 554 | AGTTTTCATTG | 2 | 1 | NC | NC | 85.86 | 26.44 | 6.19 | 2.68 | NA | NA | NA |
| | | TCCTGTTTT | | | | | | | | | | | |
| 309 | 567 | ACAGTTTCAC | 2 | 2 | NC | NC | 89.08 | 82.86 | 5.13 | 4.37 | NA | NA | NA |
| | | AAAAGTTTTC | | | | | | | | | | | |
| 316 | 584 | GGCTTTTCCA | 2 | 1 | NC | NC | 79.87 | 105.73 | 3.27 | 5.14 | NA | NA | NA |
| | | CTCTGAAACA | | | | | | | | | | | |
| 317 | 585 | GGGCTTTTCC | 2 | 2 | NC | NC | 75.58 | 156.14 | 5.08 | 9.80 | NA | NA | NA |
| | | ACTCTGAAAC | | | | | | | | | | | |
| 318 | 586 | AGGGCTTTTC | 2 | 2 | NC | NC | 66.99 | 95.25 | 5.64 | 11.62 | NA | NA | NA |
| | | CACTCTGAAA | | | | | | | | | | | |
| 319 | 587 | CAGGGCTTTT | 2 | 2 | NC | NC | 64.01 | 27.51 | 4.07 | 0.76 | NA | NA | NA |
| | | CCACTCTGAA | | | | | | | | | | | |
| 320 | 588 | TCAGGGCTTT | 2 | 2 | NC | NC | 61.84 | 36.06 | 14.35 | 2.59 | NA | NA | NA |
| | | TCCACTCTGA | | | | | | | | | | | |
| 321 | 589 | TTCAGGGCTT | 2 | 2 | NC | NC | 56.27 | 43.83 | 9.73 | 4.59 | NA | NA | NA |
| | | TTCCACTCTG | | | | | | | | | | | |
| 322 | 590 | TTTCAGGGCT | 2 | 1 | NC | NC | 69.47 | 12.11 | 2.21 | 2.43 | 0.23 | 0.99 | 4.72 |
| | | TTTCCACTCT | | | | | | | | | | | |
| 328 | 613 | CTAGTCACAT | 3 | 3 | NC | NC | 74.37 | 15.78 | 6.09 | 6.37 | NA | NA | NA |
| | | CAGCTTCACA | | | | | | | | | | | |
| 329 | 614 | TCTAGTCACAT | 2 | 2 | NC | NC | 64.74 | 30.36 | 2.06 | 3.30 | NA | NA | NA |
| | | CAGCTTCAC | | | | | | | | | | | |
| 366 | 684 | CCATGCATTT | 2 | 2 | NC | NC | 82.11 | 9.26 | 14.94 | 1.38 | NA | NA | NA |
| | | CCTCCTTACA | | | | | | | | | | | |
| 367 | 685 | TCCATGCATTT | 2 | 2 | NC | NC | 67.01 | 8.69 | 3.44 | 1.52 | 0.21 | 0.73 | 3.24 |
| | | CCTCCTTAC | | | | | | | | | | | |
| 368 | 686 | GTCCATGCAT | 2 | 2 | NC | NC | 72.03 | 17.51 | 4.65 | 2.55 | 0.13 | 0.42 | 3.75 |
| | | TTCCTCCTTA | | | | | | | | | | | |
| 370 | 688 | GGGTCCATGC | 2 | 2 | NC | NC | 55.45 | 95.20 | 4.57 | 3.51 | NA | NA | NA |
| | | ATTTCCTCCT | | | | | | | | | | | |
| 376 | 694 | AGTCTAGGGT | 2 | 2 | NC | NC | 68.73 | 71.63 | 4.31 | 5.94 | NA | NA | NA |
| | | CCATGCATTT | | | | | | | | | | | |
| 377 | 695 | CAGTCTAGGG | 2 | 3 | NC | NC | 65.93 | 29.22 | 2.48 | 1.68 | NA | NA | NA |
| | | TCCATGCATT | | | | | | | | | | | |
| 378 | 696 | CCAGTCTAGG | 2 | 2 | NC | NC | 68.89 | 43.82 | 12.06 | 2.01 | NA | NA | NA |
| | | GTCCATGCAT | | | | | | | | | | | |
| 379 | 697 | TCCAGTCTAG | 2 | 2 | NC | NC | 69.40 | 17.13 | 6.12 | 4.20 | 0.04 | 0.14 | 0.69 |
| | | GGTCCATGCA | | | | | | | | | | | |
| 381 | 700 | AACTCCAGTC | 2 | 2 | NC | NC | 70.96 | 25.76 | 2.51 | 2.83 | NA | NA | NA |
| | | TAGGGTCCAT | | | | | | | | | | | |
| 382 | 701 | AAACTCCAGT | 2 | 2 | NC | NC | 65.58 | 25.73 | 2.58 | 2.89 | NA | NA | NA |
| | | CTAGGGTCCA | | | | | | | | | | | |
| 383 | 702 | CAAACTCCAG | 2 | 2 | NC | NC | 67.74 | 20.58 | 1.66 | 3.61 | NA | NA | NA |
| | | TCTAGGGTCC | | | | | | | | | | | |
| 384 | 703 | TCAAACTCCA | 2 | 2 | NC | NC | 68.97 | 17.75 | 1.89 | 5.81 | 0.04 | 0.16 | 0.89 |
| | | GTCTAGGGTC | | | | | | | | | | | |
| 385 | 704 | CTCAAACTCC | 2 | 2 | NC | NC | 64.06 | 17.11 | 0.68 | 4.06 | 0.01 | 0.06 | 0.44 |
| | | AGTCTAGGGT | | | | | | | | | | | |
| 386 | 705 | TCTCAAACTC | 2 | 2 | NC | NC | 59.61 | 27.43 | 2.42 | 1.28 | NA | NA | NA |
| | | CAGTCTAGGG | | | | | | | | | | | |
| 387 | 706 | TTCTCAAACTC | 2 | 2 | NC | NC | 69.04 | 20.37 | 4.66 | 1.93 | NA | NA | NA |
| | | CAGTCTAGG | | | | | | | | | | | |
| 388 | 707 | CTTCTCAAACT | 2 | 2 | NC | NC | 62.05 | 16.91 | 6.78 | 1.92 | 0.39 | 1.16 | 8.90 |
| | | CCAGTCTAG | | | | | | | | | | | |
| 389 | 708 | CCTTCTCAAA | 2 | 2 | NC | NC | 71.55 | 15.14 | 2.65 | 3.37 | 0.34 | 1.31 | 6.20 |
| | | CTCCAGTCTA | | | | | | | | | | | |
| 390 | 709 | ACCTTCTCAAA | 2 | 2 | NC | NC | 71.92 | 25.78 | 4.24 | 1.45 | NA | NA | NA |
| | | CTCCAGTCT | | | | | | | | | | | |
| 391 | 710 | AACCTTCTCAA | 2 | 2 | NC | NC | 71.82 | 13.89 | 1.28 | 2.30 | 0.07 | 0.31 | 3.27 |
| | | ACTCCAGTC | | | | | | | | | | | |
| 392 | 711 | TAACCTTCTCA | 2 | 1 | NC | NC | 74.03 | 11.74 | 5.34 | 1.85 | 0.15 | 0.84 | 5.10 |
| | | AACTCCAGT | | | | | | | | | | | |
| 393 | 712 | CTAACCTTCTC | 2 | 2 | NC | NC | 79.92 | 11.57 | 3.50 | 1.51 | NA | NA | NA |
| | | AAACTCCAG | | | | | | | | | | | |
| 394 | 713 | CCTAACCTTCT | 2 | 1 | NC | NC | 79.57 | 11.43 | 4.85 | 2.23 | NA | NA | NA |
| | | CAAACTCCA | | | | | | | | | | | |
| 395 | 714 | GCCTAACCTT | 2 | 2 | NC | NC | 64.28 | 20.03 | 15.77 | 3.63 | 0.12 | 0.45 | 3.27 |
| | | CTCAAACTCC | | | | | | | | | | | |
| 396 | 715 | TGCCTAACCT | 2 | 2 | NC | NC | 96.06 | 22.74 | 15.84 | 1.57 | NA | NA | NA |
| | | TCTCAAACTC | | | | | | | | | | | |
| 397 | 716 | CTGCCTAACC | 2 | 1 | NC | NC | 85.17 | 21.36 | 4.27 | 3.49 | NA | NA | NA |
| | | TTCTCAAACT | | | | | | | | | | | |
| 398 | 717 | TCTGCCTAAC | 2 | 1 | NC | NC | 88.59 | 27.39 | 1.59 | 4.98 | NA | NA | NA |
| | | CTTCTCAAAC | | | | | | | | | | | |
| 399 | 718 | CTCTGCCTAA | 2 | 2 | NC | NC | 78.68 | 14.58 | 9.47 | 4.65 | NA | NA | NA |
| | | CCTTCTCAAA | | | | | | | | | | | |
| 487 | 821 | ACATACGTCTT | 2 | 2 | NC | NC | 70.72 | 35.34 | 6.48 | 2.24 | NA | NA | NA |
| | | TGGTTTTAG | | | | | | | | | | | |
| 488 | 822 | AACATACGTC | 2 | 2 | NC | NC | 83.56 | 35.11 | 2.57 | 4.54 | NA | NA | NA |
| | | TTTGGTTTTA | | | | | | | | | | | |
| 489 | 823 | GAACATACGT | 2 | 2 | NC | NC | 81.77 | 57.14 | 4.53 | 10.08 | NA | NA | NA |
| | | CTTTGGTTTT | | | | | | | | | | | |
| 511 | 845 | TCCATAAATTT | 2 | 1 | NC | NC | 96.45 | 23.33 | 3.53 | 3.81 | NA | NA | NA |
| | | GACAAAATC | | | | | | | | | | | |
| 514 | 850 | CCCAATCCAT | 2 | 2 | NC | NC | 86.56 | 11.43 | 6.66 | 2.22 | NA | NA | NA |
| | | AAATTTGACA | | | | | | | | | | | |
| 515 | 851 | TCCCAATCCA | 2 | 2 | NC | NC | 60.68 | 12.61 | 14.38 | 1.93 | 0.25 | 0.95 | 4.36 |
| | | TAAATTTGAC | | | | | | | | | | | |
| 516 | 852 | TTCCCAATCC | 2 | 1 | NC | NC | 75.59 | 15.97 | 2.48 | 1.98 | NA | NA | NA |
| | | ATAAATTTGA | | | | | | | | | | | |
| 517 | 853 | TTTCCCAATCC | 2 | 1 | NC | NC | 87.53 | 18.38 | 2.99 | 4.84 | NA | NA | NA |
| | | ATAAATTTG | | | | | | | | | | | |
| 520 | 856 | GACTTTCCCA | 2 | 2 | NC | NC | 80.81 | 39.33 | 2.85 | 2.22 | NA | NA | NA |
| | | ATCCATAAAT | | | | | | | | | | | |
| 521 | 857 | GGACTTTCCC | 2 | 2 | NC | NC | 71.46 | 112.84 | 8.75 | 11.34 | NA | NA | NA |
| | | AATCCATAAA | | | | | | | | | | | |
| 566 | 955 | AACAAAAACT | 1 | 2 | 1 | 2 | 91.61 | 33.40 | 4.65 | 2.33 | NA | NA | NA |
| | | GCATATTCTT | | | | | | | | | | | |
| 567 | 956 | AAACAAAAACT | 1 | 1 | 1 | 2 | 94.58 | 27.27 | 4.20 | 1.24 | NA | NA | NA |
| | | GCATATTCT | | | | | | | | | | | |
| 568 | 957 | CAAACAAAAA | 2 | 2 | 2 | 1 | 89.77 | 24.51 | 3.48 | 2.37 | NA | NA | NA |
| | | CTGCATATTC | | | | | | | | | | | |
| 569 | 958 | ACAAACAAAA | 1 | 1 | 1 | 2 | 99.32 | 53.98 | 6.18 | 3.61 | NA | NA | NA |
| | | ACTGCATATT | | | | | | | | | | | |
| 573 | 962 | GTTCACAAAC | 1 | 2 | 1 | 2 | 68.74 | 37.94 | 5.84 | 2.62 | NA | NA | NA |
| | | AAAAACTGCA | | | | | | | | | | | |
| 591 | 991 | TGTAGCTTTGT | 2 | 2 | NC | NC | 71.77 | 21.72 | 4.41 | 2.37 | NA | NA | NA |
| | | CCTTAAAAC | | | | | | | | | | | |
| 593 | 993 | TATGTAGCTTT | 2 | 2 | NC | NC | 74.13 | 15.76 | 5.06 | 5.42 | NA | NA | NA |
| | | GTCCTTAAA | | | | | | | | | | | |
| 594 | 994 | TTATGTAGCTT | 2 | 2 | NC | NC | 74.46 | 11.80 | 4.57 | 6.26 | 0.14 | 0.49 | 2.69 |
| | | TGTCCTTAA | | | | | | | | | | | |
| 596 | 996 | GTTTATGTAG | 2 | 2 | NC | NC | 80.57 | 93.92 | 9.82 | 4.48 | NA | NA | NA |
| | | CTTTGTCCTT | | | | | | | | | | | |
| 598 | 998 | GAGTTTATGTA | 2 | 2 | NC | NC | 71.72 | 57.48 | 4.63 | 6.60 | NA | NA | NA |
| | | GCTTTGTCC | | | | | | | | | | | |
| 599 | 999 | TGAGTTTATGT | 2 | 2 | NC | NC | 74.89 | 27.84 | 3.23 | 1.82 | NA | NA | NA |
| | | AGCTTTGTC | | | | | | | | | | | |
| 600 | 1000 | ATGAGTTTATG | 2 | 1 | NC | NC | 78.20 | 51.14 | 3.45 | 1.92 | NA | NA | NA |
| | | TAGCTTTGT | | | | | | | | | | | |
| 602 | 1002 | CAATGAGTTTA | 2 | 2 | NC | NC | 75.22 | 13.63 | 4.08 | 0.86 | NA | NA | NA |
| | | TGTAGCTTT | | | | | | | | | | | |
| 666 | 1132 | CACTGCACAT | 2 | 2 | NC | NC | 86.38 | 19.28 | 5.73 | 2.62 | NA | NA | NA |
| | | TAATTACATA | | | | | | | | | | | |
| 667 | 1133 | GCACTGCACA | 2 | 1 | NC | NC | 83.35 | 96.52 | 4.00 | 4.57 | NA | NA | NA |
| | | TTAATTACAT | | | | | | | | | | | |
| 669 | 1135 | TGGCACTGCA | 2 | 2 | NC | NC | 88.48 | 15.35 | 20.54 | 2.58 | NA | NA | NA |
| | | CATTAATTAC | | | | | | | | | | | |
| 670 | 1136 | TTGGCACTGC | 2 | 2 | NC | NC | 80.34 | 19.46 | 4.68 | 0.91 | NA | NA | NA |
| | | ACATTAATTA | | | | | | | | | | | |
| 671 | 1137 | ATTGGCACTG | 2 | 2 | NC | NC | 86.17 | 51.51 | 4.80 | 2.16 | NA | NA | NA |
| | | CACATTAATT | | | | | | | | | | | |
| 701 | 1180 | ATCAGAGTTTT | 2 | 2 | 2 | 2 | 69.02 | 35.95 | 2.06 | 3.49 | NA | NA | NA |
| | | GGCTGGCTC | | | | | | | | | | | |
| 702 | 1181 | AATCAGAGTTT | 2 | 2 | 2 | 2 | 63.90 | 39.92 | 1.63 | 4.52 | NA | NA | NA |
| | | TGGCTGGCT | | | | | | | | | | | |
| 703 | 1182 | CAATCAGAGT | 2 | 2 | 2 | 2 | 65.26 | 26.28 | 2.95 | 3.50 | 0.07 | 0.23 | ND |
| | | TTTGGCTGGC | | | | | | | | | | | |
| 704 | 1183 | TCAATCAGAG | 2 | 2 | 2 | 2 | 71.61 | 34.85 | 3.07 | 2.52 | NA | NA | NA |
| | | TTTTGGCTGG | | | | | | | | | | | |
| 719 | 1204 | AGAGTGTCCC | 2 | 2 | NC | NC | 64.55 | 148.30 | 1.97 | 6.08 | NA | NA | NA |
| | | AGTTCTGAAA | | | | | | | | | | | |
| 720 | 1205 | GAGAGTGTCC | 2 | 2 | NC | NC | 66.32 | 98.81 | 6.09 | 5.02 | NA | NA | NA |
| | | CAGTTCTGAA | | | | | | | | | | | |
| 721 | 1206 | AGAGAGTGTC | 2 | 2 | NC | NC | 62.41 | 75.95 | 1.14 | 25.39 | NA | NA | NA |
| | | CCAGTTCTGA | | | | | | | | | | | |
| 728 | 1213 | CAAAACAAGA | 2 | 1 | NC | NC | 76.06 | 13.81 | 12.21 | 1.67 | NA | NA | NA |
| | | GAGTGTCCCA | | | | | | | | | | | |
| 749 | 1234 | ATTTTCACTCC | 2 | 1 | NC | NC | 81.05 | 40.09 | 3.41 | 4.01 | NA | NA | NA |
| | | TTCCTGAAT | | | | | | | | | | | |
| 750 | 1235 | CATTTTCACTC | 2 | 2 | NC | NC | 76.24 | 14.95 | 6.33 | 3.38 | NA | NA | NA |
| | | CTTCCTGAA | | | | | | | | | | | |
| 751 | 1236 | ACATTTTCACT | 2 | 2 | NC | NC | 69.48 | 15.51 | 9.75 | 1.75 | 0.39 | 1.41 | ND |
| | | CCTTCCTGA | | | | | | | | | | | |
| 752 | 1237 | AACATTTTCAC | 2 | 2 | NC | NC | 70.68 | 13.87 | 2.65 | 1.57 | 0.39 | 1.07 | 8.02 |
| | | TCCTTCCTG | | | | | | | | | | | |
| 753 | 1238 | AAACATTTTCA | 2 | 2 | NC | NC | 75.55 | 11.15 | 3.73 | 1.12 | 0.57 | 1.84 | 7.69 |
| | | CTCCTTCCT | | | | | | | | | | | |
| 755 | 1240 | AAAAACATTTT | 2 | 1 | NC | NC | 79.25 | 13.25 | 6.99 | 1.87 | NA | NA | NA |
| | | CACTCCTTC | | | | | | | | | | | |
| 757 | 1242 | TTAAAAACATT | 2 | 1 | NC | NC | 82.65 | 17.72 | 6.24 | 2.56 | NA | NA | NA |
| | | TTCACTCCT | | | | | | | | | | | |
| 784 | 1290 | ATTCCTTAATA | 2 | 2 | NC | NC | 78.04 | 15.48 | 5.23 | 0.95 | NA | NA | NA |
| | | TCCTCACCT | | | | | | | | | | | |
| 786 | 1292 | AAATTCCTTAA | 2 | 2 | NC | NC | 81.35 | 17.87 | 5.88 | 2.23 | NA | NA | NA |
| | | TATCCTCAC | | | | | | | | | | | |
| 787 | 1293 | TAAATTCCTTA | 2 | 2 | NC | NC | 83.49 | 23.29 | 3.85 | 4.04 | NA | NA | NA |
| | | ATATCCTCA | | | | | | | | | | | |
| 788 | 1294 | CTAAATTCCTT | 2 | 2 | NC | NC | 77.48 | 26.26 | 3.28 | 2.35 | NA | NA | NA |
| | | AATATCCTC | | | | | | | | | | | |
| 790 | 1296 | CACTAAATTCC | 2 | 2 | NC | NC | 82.57 | 31.46 | 2.87 | 2.53 | NA | NA | NA |
| | | TTAATATCC | | | | | | | | | | | |
| 828 | 1354 | TCATCGGAAG | 2 | 3 | NC | NC | 67.51 | 11.20 | 3.20 | 1.82 | 0.22 | 0.77 | 4.29 |
| | | TCACACGCTT | | | | | | | | | | | |
| 829 | 1355 | CTCATCGGAA | 2 | 2 | NC | NC | 68.94 | 15.81 | 3.19 | 1.49 | 0.19 | 0.67 | 3.18 |
| | | GTCACACGCT | | | | | | | | | | | |
| 830 | 1356 | TCTCATCGGA | 2 | 2 | NC | NC | 73.66 | 14.18 | 2.63 | 3.48 | 0.17 | 0.69 | 3.43 |
| | | AGTCACACGC | | | | | | | | | | | |
| 959 | 1539 | GACCACCTGA | 2 | 2 | NC | NC | 69.12 | 47.95 | 6.78 | 11.48 | NA | NA | NA |
| | | TTCATAAATG | | | | | | | | | | | |
| 960 | 1540 | GGACCACCTG | 2 | 2 | NC | NC | 79.02 | 206.94 | 4.65 | 56.26 | NA | NA | NA |
| | | ATTCATAAAT | | | | | | | | | | | |
| 961 | 1542 | CTGGACCACC | 2 | 2 | NC | NC | 79.65 | 55.49 | 7.13 | 4.02 | NA | NA | NA |
| | | TGATTCATAA | | | | | | | | | | | |
| 964 | 1563 | GCTCTGTCAT | 2 | 2 | NC | NC | 77.42 | 70.22 | 1.40 | 2.14 | NA | NA | NA |
| | | TTTGCTATGG | | | | | | | | | | | |
| 965 | 1564 | GGCTCTGTCA | 2 | 2 | NC | NC | 78.46 | 81.64 | 2.58 | 1.06 | NA | NA | NA |
| | | TTTTGCTATG | | | | | | | | | | | |
| 967 | 1566 | ATGGCTCTGT | 2 | 2 | NC | NC | 77.47 | 50.42 | 1.09 | 1.68 | NA | NA | NA |
| | | CATTTTGCTA | | | | | | | | | | | |
| 968 | 1567 | GATGGCTCTG | 2 | 2 | NC | NC | 75.71 | 104.49 | 3.59 | 15.27 | NA | NA | NA |
| | | TCATTTTGCT | | | | | | | | | | | |
| 971 | 1570 | AAAGATGGCT | 2 | 2 | NC | NC | 85.42 | 51.21 | 4.94 | 0.57 | NA | NA | NA |
| | | CTGTCATTTT | | | | | | | | | | | |
| 972 | 1571 | TAAAGATGGC | 2 | 2 | NC | NC | 71.44 | 16.26 | 18.64 | 2.69 | NA | NA | NA |
| | | TCTGTCATTT | | | | | | | | | | | |
| 973 | 1572 | GTAAAGATGG | 2 | 2 | NC | NC | 85.49 | 84.58 | 2.18 | 10.18 | NA | NA | NA |
| | | CTCTGTCATT | | | | | | | | | | | |
| 974 | 1573 | TGTAAAGATG | 2 | 2 | NC | NC | 87.95 | 17.81 | 3.14 | 1.82 | NA | NA | NA |
| | | GCTCTGTCAT | | | | | | | | | | | |
| 975 | 1574 | TTGTAAAGAT | 2 | 2 | NC | NC | 88.69 | 14.78 | 0.99 | 1.26 | NA | NA | NA |
| | | GGCTCTGTCA | | | | | | | | | | | |
| 976 | 1575 | TTTGTAAAGAT | 2 | 2 | NC | NC | 86.84 | 14.94 | 1.99 | 2.71 | NA | NA | NA |
| | | GGCTCTGTC | | | | | | | | | | | |
| 977 | 1576 | TTTTGTAAAGA | 2 | 2 | NC | NC | 90.05 | 17.51 | 1.81 | 3.62 | NA | NA | NA |
| | | TGGCTCTGT | | | | | | | | | | | |
| 986 | 1588 | GAGCTGTCTT | 2 | 2 | NC | NC | 80.81 | 130.73 | 2.60 | 8.33 | NA | NA | NA |
| | | TGTTTTGTAA | | | | | | | | | | | |
| 987 | 1589 | AGAGCTGTCT | 2 | 2 | NC | NC | 78.87 | 83.79 | 2.43 | 6.83 | NA | NA | NA |
| | | TTGTTTTGTA | | | | | | | | | | | |
| 1002 | 1626 | CAATTGTCTCT | 2 | 2 | NC | NC | 77.84 | 12.02 | 5.97 | 2.15 | NA | NA | NA |
| | | TGTTCTAAC | | | | | | | | | | | |
| 1003 | 1627 | ACAATTGTCTC | 2 | 1 | NC | NC | 86.71 | 66.67 | 3.79 | 3.42 | NA | NA | NA |
| | | TTGTTCTAA | | | | | | | | | | | |
| 1004 | 1628 | TACAATTGTCT | 2 | 2 | NC | NC | 77.06 | 24.92 | 4.21 | 2.75 | NA | NA | NA |
| | | CTTGTTCTA | | | | | | | | | | | |
| 1005 | 1629 | CTACAATTGTC | 2 | 2 | NC | NC | 71.10 | 17.61 | 3.81 | 3.54 | 0.14 | 0.48 | 2.52 |
| | | TCTTGTTCT | | | | | | | | | | | |
| 1006 | 1630 | GCTACAATTG | 2 | 2 | NC | NC | 75.21 | 164.15 | 3.53 | 7.38 | NA | NA | NA |
| | | TCTCTTGTTC | | | | | | | | | | | |
| 1007 | 1631 | TGCTACAATT | 2 | 2 | NC | NC | 68.01 | 43.68 | 5.57 | 3.18 | NA | NA | NA |
| | | GTCTCTTGTT | | | | | | | | | | | |
| 1008 | 1633 | GATGCTACAA | 2 | 2 | NC | NC | 76.75 | 157.84 | 4.28 | 14.35 | NA | NA | NA |
| | | TTGTCTCTTG | | | | | | | | | | | |
| 1009 | 1634 | TGATGCTACA | 2 | 2 | NC | NC | 93.24 | 19.27 | 32.66 | 1.18 | NA | NA | NA |
| | | ATTGTCTCTT | | | | | | | | | | | |
| 1010 | 1635 | CTGATGCTAC | 2 | 2 | NC | NC | 79.27 | 34.33 | 2.33 | 1.43 | NA | NA | NA |
| | | AATTGTCTCT | | | | | | | | | | | |
| 1011 | 1636 | TCTGATGCTA | 2 | 1 | NC | NC | 74.33 | 26.98 | 3.75 | 2.56 | NA | NA | NA |
| | | CAATTGTCTC | | | | | | | | | | | |
| 1012 | 1637 | TTCTGATGCTA | 2 | 1 | NC | NC | 74.47 | 19.62 | 3.96 | 6.13 | NA | NA | NA |
| | | CAATTGTCT | | | | | | | | | | | |
| 1013 | 1638 | CTTCTGATGC | 2 | 2 | NC | NC | 76.90 | 39.77 | 1.15 | 4.56 | NA | NA | NA |
| | | TACAATTGTC | | | | | | | | | | | |
| 1014 | 1639 | GCTTCTGATG | 2 | 2 | NC | NC | 72.48 | 113.69 | 5.55 | 8.85 | NA | NA | NA |
| | | CTACAATTGT | | | | | | | | | | | |
| 1086 | 1742 | TGGTGTCTGA | 2 | 2 | NC | NC | 75.01 | 41.17 | 4.46 | 5.94 | NA | NA | NA |
| | | AAAGGGCTTA | | | | | | | | | | | |
| 1110 | 1785 | CTTTCCATATT | 2 | 2 | NC | NC | 85.18 | 26.06 | 2.72 | 2.17 | NA | NA | NA |
| | | TCTAGATCC | | | | | | | | | | | |
| 1111 | 1786 | TCTTTCCATAT | 2 | 2 | NC | NC | 78.80 | 27.68 | 3.78 | 2.79 | NA | NA | NA |
| | | TTCTAGATC | | | | | | | | | | | |
| 1121 | 1796 | AGTAGTACTTT | 2 | 2 | NC | NC | 80.48 | 64.18 | 2.34 | 2.76 | NA | NA | NA |
| | | CTTTCCATA | | | | | | | | | | | |
| 1126 | 1801 | TTAACAGTAGT | 2 | 2 | NC | NC | 84.35 | 22.72 | 2.03 | 2.88 | NA | NA | NA |
| | | ACTTTCTTT | | | | | | | | | | | |
| 1127 | 1802 | ATTAACAGTA | 2 | 2 | NC | NC | 55.07 | 79.59 | 34.67 | 5.19 | NA | NA | NA |
| | | GTACTTTCTT | | | | | | | | | | | |
| 1147 | 1848 | GTTGATTCTG | 2 | 2 | NC | NC | 69.33 | 128.16 | 3.03 | 3.50 | NA | NA | NA |
| | | AATTCTATTA | | | | | | | | | | | |
| 1148 | 1849 | GGTTGATTCT | 2 | 2 | NC | NC | 65.93 | 188.28 | 4.48 | 11.46 | NA | NA | NA |
| | | GAATTCTATT | | | | | | | | | | | |
| 1149 | 1850 | TGGTTGATTCT | 2 | 2 | NC | NC | 69.18 | 44.46 | 4.72 | 7.24 | NA | NA | NA |
| | | GAATTCTAT | | | | | | | | | | | |
| 1172 | 1873 | TCAGTAGCAT | 2 | 1 | NC | NC | 74.20 | 20.17 | 5.52 | 2.86 | NA | NA | NA |
| | | CTTTAAATCT | | | | | | | | | | | |
| 1175 | 1876 | ACTTCAGTAG | 2 | 2 | NC | NC | 78.49 | 123.59 | 4.03 | 9.36 | NA | NA | NA |
| | | CATCTTTAAA | | | | | | | | | | | |
| 1176 | 1877 | CACTTCAGTA | 2 | 1 | NC | NC | 75.25 | 11.77 | 5.40 | 1.32 | 0.69 | 2.09 | 8.02 |
| | | GCATCTTTAA | | | | | | | | | | | |
| 1177 | 1878 | CCACTTCAGT | 2 | 2 | NC | NC | 68.95 | 8.07 | 4.38 | 0.39 | 0.14 | 0.58 | 3.80 |
| | | AGCATCTTTA | | | | | | | | | | | |
| 1178 | 1879 | CCCACTTCAG | 2 | 2 | NC | NC | 65.87 | 8.11 | 2.09 | 1.80 | 0.10 | 0.39 | 1.99 |
| | | TAGCATCTTT | | | | | | | | | | | |
| 1179 | 1880 | TCCCACTTCA | 2 | 2 | NC | NC | 67.23 | 10.92 | 2.21 | 3.12 | 0.15 | 0.54 | 2.51 |
| | | GTAGCATCTT | | | | | | | | | | | |
| 1180 | 1881 | ATCCCACTTC | 2 | 2 | NC | NC | 67.00 | 18.94 | 2.11 | 2.86 | 0.04 | 0.28 | 2.14 |
| | | AGTAGCATCT | | | | | | | | | | | |
| 1181 | 1882 | CATCCCACTT | 2 | 2 | NC | NC | 71.78 | 20.23 | 2.13 | 1.55 | NA | NA | NA |
| | | CAGTAGCATC | | | | | | | | | | | |
| 1182 | 1883 | GCATCCCACT | 2 | 2 | NC | NC | 68.68 | 114.92 | 2.54 | 10.08 | NA | NA | NA |
| | | TCAGTAGCAT | | | | | | | | | | | |
| 1183 | 1884 | GGCATCCCAC | 2 | 2 | NC | NC | 72.93 | 113.70 | 11.52 | 21.89 | NA | NA | NA |
| | | TTCAGTAGCA | | | | | | | | | | | |
| 1184 | 1885 | TGGCATCCCA | 2 | 2 | NC | NC | 69.63 | 69.40 | 4.84 | 3.66 | NA | NA | NA |
| | | CTTCAGTAGC | | | | | | | | | | | |
| 1185 | 1886 | CTGGCATCCC | 2 | 2 | NC | NC | 72.14 | 45.78 | 4.09 | 2.59 | NA | NA | NA |
| | | ACTTCAGTAG | | | | | | | | | | | |
| 1186 | 1887 | GCTGGCATCC | 2 | 2 | NC | NC | 69.71 | 65.90 | 4.70 | 2.86 | NA | NA | NA |
| | | CACTTCAGTA | | | | | | | | | | | |
| 1260 | 2029 | TGAGTTATAAA | 2 | 1 | 2 | NC | 68.42 | 47.42 | 4.50 | 2.18 | NA | NA | NA |
| | | GCCAGTGGA | | | | | | | | | | | |
| 1261 | 2030 | ATGAGTTATAA | 2 | 2 | 2 | NC | 72.80 | 57.12 | 0.99 | 3.07 | NA | NA | NA |
| | | AGCCAGTGG | | | | | | | | | | | |
| 1270 | 2065 | GTTTCAGTTG | 2 | 2 | NC | NC | 78.59 | 106.70 | 2.25 | 29.03 | NA | NA | NA |
| | | ATTTAGTTTT | | | | | | | | | | | |
| 1271 | 2066 | TGTTTCAGTTG | 2 | 1 | NC | NC | 82.53 | 32.40 | 3.39 | 4.98 | NA | NA | NA |
| | | ATTTAGTTT | | | | | | | | | | | |
| 1272 | 2067 | CTGTTTCAGTT | 2 | 2 | NC | NC | 76.30 | 24.47 | 2.77 | 5.14 | NA | NA | NA |
| | | GATTTAGTT | | | | | | | | | | | |
| 1273 | 2068 | TCTGTTTCAGT | 2 | 2 | NC | NC | 68.38 | 27.94 | 14.27 | 2.36 | NA | NA | NA |
| | | TGATTTAGT | | | | | | | | | | | |
| 1274 | 2069 | TTCTGTTTCAG | 2 | 1 | 2 | NC | 76.46 | 12.90 | 6.14 | 0.77 | 0.38 | 1.13 | 4.72 |
| | | TTGATTTAG | | | | | | | | | | | |
| 1275 | 2070 | GTTCTGTTTCA | 2 | 2 | 2 | NC | 66.45 | 118.07 | 4.03 | 5.40 | NA | NA | NA |
| | | GTTGATTTA | | | | | | | | | | | |
| 1276 | 2071 | TGTTCTGTTTC | 1 | 1 | 1 | NC | 65.68 | 30.63 | 2.73 | 0.37 | NA | NA | NA |
| | | AGTTGATTT | | | | | | | | | | | |
| 1277 | 2072 | ATGTTCTGTTT | 1 | 1 | 2 | NC | 65.66 | 34.51 | 2.06 | 1.78 | NA | NA | NA |
| | | CAGTTGATT | | | | | | | | | | | |
| 1297 | 2118 | TTTCTTGGGC | 2 | 1 | NC | NC | 61.03 | 18.52 | 6.51 | 2.34 | 0.05 | 0.31 | 2.96 |
| | | ACGTGTGGGA | | | | | | | | | | | |
| 1300 | 2122 | AATGTTTCTTG | 2 | 2 | NC | NC | 60.38 | 53.85 | 2.71 | 9.00 | NA | NA | NA |
| | | GGCACGTGT | | | | | | | | | | | |
| 1302 | 2124 | CAAATGTTTCT | 2 | 2 | NC | NC | 50.98 | 16.06 | 15.03 | 2.05 | 0.14 | 0.41 | 2.23 |
| | | TGGGCACGT | | | | | | | | | | | |
| 1310 | 2138 | ACGTGTTCTAT | 2 | 2 | NC | NC | 73.53 | 79.81 | 8.72 | 2.83 | NA | NA | NA |
| | | TTCCAAATG | | | | | | | | | | | |
| 1387 | 2259 | TAGGTTCATTC | 2 | 2 | NC | NC | 63.57 | 12.33 | 1.67 | 1.91 | 0.03 | 0.14 | 1.04 |
| | | TCTAGCCCA | | | | | | | | | | | |
| 1388 | 2260 | GTAGGTTCAT | 2 | 2 | NC | NC | 69.80 | 48.38 | 3.08 | 0.78 | NA | NA | NA |
| | | TCTCTAGCCC | | | | | | | | | | | |
| 1389 | 2261 | TGTAGGTTCA | 2 | 2 | NC | NC | 69.61 | 45.78 | 2.74 | 9.52 | NA | NA | NA |
| | | TTCTCTAGCC | | | | | | | | | | | |
| 1390 | 2262 | CTGTAGGTTC | 2 | 2 | NC | NC | 71.89 | 31.39 | 7.34 | 2.62 | NA | NA | NA |
| | | ATTCTCTAGC | | | | | | | | | | | |
| 1391 | 2263 | GCTGTAGGTT | 2 | 2 | NC | NC | 73.44 | 130.40 | 5.21 | 13.47 | NA | NA | NA |
| | | CATTCTCTAG | | | | | | | | | | | |
| 1392 | 2264 | TGCTGTAGGT | 2 | 2 | NC | NC | 68.83 | 29.39 | 10.26 | 1.58 | NA | NA | NA |
| | | TCATTCTCTA | | | | | | | | | | | |
| 1393 | 2265 | TTGCTGTAGG | 2 | 2 | NC | NC | 64.56 | 18.57 | 5.04 | 1.50 | 0.05 | 0.23 | 2.96 |
| | | TTCATTCTCT | | | | | | | | | | | |
| 1394 | 2266 | GTTGCTGTAG | 2 | 2 | NC | NC | 70.73 | 117.81 | 5.81 | 15.37 | NA | NA | NA |
| | | GTTCATTCTC | | | | | | | | | | | |
| 1395 | 2267 | AGTTGCTGTA | 2 | 2 | NC | NC | 70.69 | 95.10 | 3.97 | 10.79 | NA | NA | NA |
| | | GGTTCATTCT | | | | | | | | | | | |
| 1396 | 2268 | AAGTTGCTGT | 2 | 2 | NC | NC | 69.93 | 42.84 | 2.50 | 9.05 | NA | NA | NA |
| | | AGGTTCATTC | | | | | | | | | | | |
| 1461 | 2390 | ATCTGTTTTCC | 2 | 2 | NC | NC | 78.96 | 23.24 | 5.39 | 2.08 | NA | NA | NA |
| | | TACTATCAT | | | | | | | | | | | |
| 1462 | 2391 | TATCTGTTTTC | 2 | 2 | NC | NC | 73.74 | 13.91 | 4.95 | 2.57 | NA | NA | NA |
| | | CTACTATCA | | | | | | | | | | | |
| 1463 | 2392 | TTATCTGTTTT | 2 | 2 | NC | NC | 61.32 | 12.11 | 19.41 | 2.41 | 0.54 | 1.28 | 3.42 |
| | | CCTACTATC | | | | | | | | | | | |
| 1473 | 2424 | TACGGACGAT | 2 | 3 | NC | NC | 64.86 | 42.49 | 2.84 | 8.14 | NA | NA | NA |
| | | TGGTTTGGAG | | | | | | | | | | | |
| 1474 | 2425 | TTACGGACGA | 3 | 3 | NC | NC | 74.71 | 28.87 | 4.48 | 1.96 | NA | NA | NA |
| | | TTGGTTTGGA | | | | | | | | | | | |
| 1482 | 2433 | TTAGCTTCTTA | 2 | 2 | NC | NC | 73.20 | 16.43 | 1.80 | 2.24 | NA | NA | NA |
| | | CGGACGATT | | | | | | | | | | | |
| 1485 | 2436 | AGCTTAGCTT | 2 | 3 | NC | NC | 67.08 | 81.14 | 3.07 | 4.19 | NA | NA | NA |
| | | CTTACGGACG | | | | | | | | | | | |
| 1486 | 2448 | GCTGTGAACT | 3 | 3 | NC | NC | 68.69 | 128.36 | 1.70 | 2.50 | NA | NA | NA |
| | | CAAGCTTAGC | | | | | | | | | | | |
| 1487 | 2449 | AGCTGTGAAC | 2 | 2 | NC | NC | 70.69 | 62.48 | 4.99 | 4.34 | NA | NA | NA |
| | | TCAAGCTTAG | | | | | | | | | | | |
| 1490 | 2453 | TCCTAGCTGT | 2 | 2 | NC | NC | 70.82 | 39.13 | 4.00 | 3.11 | NA | NA | NA |
| | | GAACTCAAGC | | | | | | | | | | | |
| 1491 | 2454 | ATCCTAGCTG | 2 | 2 | NC | NC | 73.02 | 39.97 | 2.91 | 6.24 | NA | NA | NA |
| | | TGAACTCAAG | | | | | | | | | | | |
| 1492 | 2455 | GATCCTAGCT | 2 | 2 | NC | NC | 70.55 | 60.81 | 1.82 | 6.58 | NA | NA | NA |
| | | GTGAACTCAA | | | | | | | | | | | |
| 1493 | 2456 | AGATCCTAGC | 2 | 2 | NC | NC | 71.35 | 60.70 | 3.51 | 5.37 | NA | NA | NA |
| | | TGTGAACTCA | | | | | | | | | | | |
| 1494 | 2457 | AAGATCCTAG | 2 | 2 | NC | NC | 72.72 | 51.80 | 3.01 | 3.51 | NA | NA | NA |
| | | CTGTGAACTC | | | | | | | | | | | |
| 1495 | 2458 | AAAGATCCTA | 2 | 2 | NC | NC | 79.93 | 49.47 | 2.18 | 1.51 | NA | NA | NA |
| | | GCTGTGAACT | | | | | | | | | | | |
| 1498 | 2461 | TCTAAAGATC | 2 | 2 | NC | NC | 74.47 | 23.80 | 5.24 | 0.46 | NA | NA | NA |
| | | CTAGCTGTGA | | | | | | | | | | | |
| 1499 | 2462 | CTCTAAAGAT | 2 | 2 | NC | NC | 69.91 | 27.63 | 6.82 | 2.73 | NA | NA | NA |
| | | CCTAGCTGTG | | | | | | | | | | | |
| 1500 | 2463 | TCTCTAAAGAT | 2 | 2 | NC | NC | 75.81 | 26.67 | 2.37 | 1.97 | NA | NA | NA |
| | | CCTAGCTGT | | | | | | | | | | | |
| 1501 | 2464 | TTCTCTAAAGA | 2 | 2 | NC | NC | 78.09 | 38.79 | 2.41 | 3.40 | NA | NA | NA |
| | | TCCTAGCTG | | | | | | | | | | | |
| 1502 | 2465 | CTTCTCTAAAG | 2 | 2 | NC | NC | 68.81 | 22.90 | 6.78 | 1.92 | NA | NA | NA |
| | | ATCCTAGCT | | | | | | | | | | | |
| 1505 | 2468 | AAACTTCTCTA | 2 | 2 | NC | NC | 86.60 | 24.26 | 4.80 | 1.82 | NA | NA | NA |
| | | AAGATCCTA | | | | | | | | | | | |
| 1508 | 2471 | CTTAAACTTCT | 2 | 2 | NC | NC | 84.65 | 17.74 | 3.17 | 2.47 | NA | NA | NA |
| | | CTAAAGATC | | | | | | | | | | | |
| 1510 | 2473 | CTCTTAAACTT | 2 | 1 | 1 | 2 | 87.47 | 13.20 | 6.48 | 0.80 | NA | NA | NA |
| | | CTCTAAAGA | | | | | | | | | | | |
| 1511 | 2474 | CCTCTTAAACT | 1 | 1 | 2 | 2 | 73.37 | 15.35 | 5.97 | 2.14 | 0.16 | 0.81 | 4.45 |
| | | TCTCTAAAG | | | | | | | | | | | |
| 1512 | 2475 | GCCTCTTAAA | 2 | 1 | 2 | 2 | 72.85 | 31.27 | 2.89 | 1.55 | NA | NA | NA |
| | | CTTCTCTAAA | | | | | | | | | | | |
| 1513 | 2476 | TGCCTCTTAAA | 2 | 1 | 1 | 2 | 79.53 | 42.74 | 13.31 | 3.65 | NA | NA | NA |
| | | CTTCTCTAA | | | | | | | | | | | |
| 1514 | 2477 | TTGCCTCTTAA | 2 | 1 | NC | NC | 73.71 | 11.85 | 2.24 | 1.40 | 0.02 | 0.38 | 5.13 |
| | | ACTTCTCTA | | | | | | | | | | | |
| 1516 | 2479 | TATTGCCTCTT | 2 | 2 | NC | NC | 79.30 | 16.65 | 3.72 | 3.94 | NA | NA | NA |
| | | AAACTTCTC | | | | | | | | | | | |
| 1517 | 2480 | ATATTGCCTCT | 2 | 2 | NC | NC | 76.59 | 29.78 | 5.84 | 1.81 | NA | NA | NA |
| | | TAAACTTCT | | | | | | | | | | | |
| 1518 | 2481 | CATATTGCCT | 2 | 2 | NC | NC | 86.67 | 17.75 | 3.02 | 3.06 | NA | NA | NA |
| | | CTTAAACTTC | | | | | | | | | | | |
| 1525 | 2488 | ACCTTCCCAT | 2 | 2 | NC | NC | 72.28 | 28.62 | 1.91 | 3.82 | NA | NA | NA |
| | | ATTGCCTCTT | | | | | | | | | | | |
| 1526 | 2489 | AACCTTCCCA | 2 | 2 | NC | NC | 70.59 | 19.06 | 1.32 | 7.43 | NA | NA | NA |
| | | TATTGCCTCT | | | | | | | | | | | |
| 1529 | 2492 | TTCAACCTTCC | 2 | 2 | NC | NC | 74.01 | 13.77 | 5.21 | 2.28 | NA | NA | NA |
| | | CATATTGCC | | | | | | | | | | | |
| 1530 | 2493 | TTTCAACCTTC | 2 | 2 | NC | NC | 81.55 | 13.64 | 6.64 | 1.18 | NA | NA | NA |
| | | CCATATTGC | | | | | | | | | | | |
| 1546 | 2519 | TTCCTCTACTT | 2 | 2 | NC | NC | 84.26 | 19.50 | 4.19 | 5.90 | NA | NA | NA |
| | | CTGTATCCA | | | | | | | | | | | |
| 1547 | 2520 | TTTCCTCTACT | 2 | 2 | NC | NC | 85.00 | 20.32 | 5.40 | 3.25 | NA | NA | NA |
| | | TCTGTATCC | | | | | | | | | | | |
| 1572 | 2545 | CTGAGATTGG | 2 | 3 | NC | NC | 68.27 | 28.46 | 7.17 | 0.96 | NA | NA | NA |
| | | TAGTGACTCC | | | | | | | | | | | |
| 1573 | 2546 | ACTGAGATTG | 2 | 3 | NC | NC | 69.11 | 52.86 | 6.10 | 3.94 | NA | NA | NA |
| | | GTAGTGACTC | | | | | | | | | | | |
| 1574 | 2547 | GACTGAGATT | 2 | 2 | NC | NC | 78.60 | 50.74 | 8.80 | 2.24 | NA | NA | NA |
| | | GGTAGTGACT | | | | | | | | | | | |
| 1595 | 2568 | GAATGTCAGG | 2 | 2 | NC | NC | 78.06 | 56.47 | 5.71 | 10.65 | NA | NA | NA |
| | | TTCAACTTGA | | | | | | | | | | | |
| 1596 | 2569 | AGAATGTCAG | 2 | 2 | NC | NC | 77.01 | 48.82 | 4.77 | 4.06 | NA | NA | NA |
| | | GTTCAACTTG | | | | | | | | | | | |
| 1597 | 2570 | CAGAATGTCA | 2 | 2 | NC | NC | 74.20 | 17.39 | 4.52 | 1.90 | NA | NA | NA |
| | | GGTTCAACTT | | | | | | | | | | | |
| 1721 | 2730 | TAGGCATCTG | 2 | 2 | NC | NC | 73.06 | 21.72 | 4.85 | 2.93 | NA | NA | NA |
| | | TTGTTCTAAA | | | | | | | | | | | |
| 1722 | 2731 | CTAGGCATCT | 2 | 2 | NC | NC | 68.46 | 20.27 | 3.55 | 1.95 | NA | NA | NA |
| | | GTTGTTCTAA | | | | | | | | | | | |
| 1723 | 2732 | ACTAGGCATC | 2 | 3 | NC | NC | 75.00 | 69.45 | 1.93 | 7.25 | NA | NA | NA |
| | | TGTTGTTCTA | | | | | | | | | | | |
| 1724 | 2733 | AACTAGGCAT | 2 | 2 | NC | NC | 76.27 | 33.88 | 5.64 | 1.90 | NA | NA | NA |
| | | CTGTTGTTCT | | | | | | | | | | | |
| 1725 | 2734 | AAACTAGGCA | 2 | 2 | NC | NC | 70.43 | 26.81 | 24.22 | 2.05 | NA | NA | NA |
| | | TCTGTTGTTC | | | | | | | | | | | |
| 1726 | 2735 | CAAACTAGGC | 2 | 1 | NC | NC | 77.29 | 14.21 | 1.87 | 1.23 | NA | NA | NA |
| | | ATCTGTTGTT | | | | | | | | | | | |
| 1727 | 2736 | TCAAACTAGG | 2 | 2 | NC | NC | 80.67 | 14.87 | 3.79 | 1.40 | NA | NA | NA |
| | | CATCTGTTGT | | | | | | | | | | | |
| 1744 | 2764 | AACTCCTTCA | 2 | 2 | NC | NC | 66.84 | 32.00 | 3.65 | 2.80 | NA | NA | NA |
| | | GGGTCATAGG | | | | | | | | | | | |
| 1745 | 2765 | TAACTCCTTCA | 2 | 2 | NC | NC | 74.04 | 9.12 | 3.74 | 1.45 | 0.34 | 1.20 | 4.67 |
| | | GGGTCATAG | | | | | | | | | | | |
| 1746 | 2766 | ATAACTCCTTC | 2 | 2 | NC | NC | 86.21 | 14.10 | 4.66 | 3.64 | NA | NA | NA |
| | | AGGGTCATA | | | | | | | | | | | |
| 1747 | 2767 | GATAACTCCTT | 2 | 2 | NC | NC | 73.17 | 71.61 | 4.49 | 4.91 | NA | NA | NA |
| | | CAGGGTCAT | | | | | | | | | | | |
| 1748 | 2768 | AGATAACTCC | 2 | 2 | NC | NC | 76.10 | 58.88 | 4.53 | 4.26 | NA | NA | NA |
| | | TTCAGGGTCA | | | | | | | | | | | |
| 1786 | 2818 | GCTAGTGATT | 2 | 2 | NC | NC | 77.18 | 61.81 | 6.95 | 4.16 | NA | NA | NA |
| | | CAGATGACTT | | | | | | | | | | | |
| 1797 | 2829 | ATAATTTAGAG | 2 | 2 | NC | NC | 94.05 | 34.62 | 8.58 | 2.35 | NA | NA | NA |
| | | GCTAGTGAT | | | | | | | | | | | |
| 1799 | 2831 | GGATAATTTA | 2 | 2 | NC | NC | 75.22 | 65.82 | 7.97 | 3.21 | NA | NA | NA |
| | | GAGGCTAGTG | | | | | | | | | | | |
| 1800 | 2832 | TGGATAATTTA | 3 | 3 | NC | NC | 79.60 | 28.73 | 5.81 | 2.69 | NA | NA | NA |
| | | GAGGCTAGT | | | | | | | | | | | |
| 1801 | 2833 | CTGGATAATTT | 2 | 2 | NC | NC | 77.03 | 22.93 | 6.10 | 1.34 | NA | NA | NA |
| | | AGAGGCTAG | | | | | | | | | | | |
| 1802 | 2834 | TCTGGATAATT | 2 | 2 | NC | NC | 78.17 | 49.18 | 6.44 | 2.39 | NA | NA | NA |
| | | TAGAGGCTA | | | | | | | | | | | |
| 1824 | 2856 | TTTCTCTTTCG | 3 | 2 | NC | NC | 79.87 | 5.65 | 7.71 | 0.67 | 0.43 | 1.29 | 4.72 |
| | | GAACCCTTC | | | | | | | | | | | |
| 1825 | 2857 | GTTTCTCTTTC | 2 | 2 | NC | NC | 75.83 | 33.27 | 3.68 | 1.25 | NA | NA | NA |
| | | GGAACCCTT | | | | | | | | | | | |
| 1826 | 2858 | AGTTTCTCTTT | 2 | 2 | NC | NC | 76.81 | 34.76 | 5.54 | 3.44 | NA | NA | NA |
| | | CGGAACCCT | | | | | | | | | | | |
| 1831 | 2863 | GTTTGAGTTTC | 2 | 2 | NC | NC | 67.51 | 72.93 | 1.34 | 4.78 | NA | NA | NA |
| | | TCTTTCGGA | | | | | | | | | | | |
| 1832 | 2864 | TGTTTGAGTTT | 2 | 2 | NC | NC | 66.75 | 29.27 | 2.81 | 1.55 | NA | NA | NA |
| | | CTCTTTCGG | | | | | | | | | | | |
| 1835 | 2867 | CATTGTTTGA | 2 | 2 | NC | NC | 75.22 | 20.20 | 5.27 | 3.46 | NA | NA | NA |
| | | GTTTCTCTTT | | | | | | | | | | | |
| 1836 | 2868 | CCATTGTTTGA | 2 | 2 | NC | NC | 71.49 | 16.43 | 3.31 | 0.78 | NA | NA | NA |
| | | GTTTCTCTT | | | | | | | | | | | |
| 1859 | 2891 | TTCATTAAAAC | 2 | 2 | NC | NC | 91.66 | 16.04 | 2.16 | 1.84 | NA | NA | NA |
| | | GACTCATCA | | | | | | | | | | | |
| 1860 | 2892 | GTTCATTAAAA | 2 | 2 | NC | NC | 77.55 | 62.84 | 1.74 | 4.67 | NA | NA | NA |
| | | CGACTCATC | | | | | | | | | | | |
| 1861 | 2893 | AGTTCATTAAA | 2 | 2 | NC | NC | 69.23 | 66.80 | 27.11 | 3.31 | NA | NA | NA |
| | | ACGACTCAT | | | | | | | | | | | |
| 1862 | 2894 | AAGTTCATTAA | 2 | 2 | NC | NC | 84.65 | 51.64 | 7.39 | 1.43 | NA | NA | NA |
| | | AACGACTCA | | | | | | | | | | | |
| 1865 | 2897 | TGGAAGTTCA | 3 | 3 | NC | NC | 88.69 | 46.47 | 35.27 | 8.33 | NA | NA | NA |
| | | TTAAAACGAC | | | | | | | | | | | |
| 1866 | 2898 | TTGGAAGTTC | 2 | 2 | NC | NC | 71.25 | 26.95 | 4.16 | 3.49 | NA | NA | NA |
| | | ATTAAAACGA | | | | | | | | | | | |
| 1869 | 2902 | GAATTTGGAA | 2 | 2 | NC | NC | 86.52 | 58.00 | 3.96 | 4.41 | NA | NA | NA |
| | | GTTCATTAAA | | | | | | | | | | | |
| 1870 | 2903 | TGAATTTGGA | 2 | 2 | NC | NC | 90.65 | 27.21 | 4.10 | 5.36 | NA | NA | NA |
| | | AGTTCATTAA | | | | | | | | | | | |
| 1871 | 2904 | CTGAATTTGG | 2 | 2 | NC | NC | 75.35 | 14.63 | 1.81 | 2.65 | NA | NA | NA |
| | | AAGTTCATTA | | | | | | | | | | | |
| 1872 | 2905 | TCTGAATTTG | 2 | 1 | NC | NC | 84.12 | 14.91 | 23.88 | 3.23 | NA | NA | NA |
| | | GAAGTTCATT | | | | | | | | | | | |
| 1873 | 2906 | ATCTGAATTTG | 2 | 2 | NC | NC | 71.15 | 36.46 | 4.06 | 2.57 | NA | NA | NA |
| | | GAAGTTCAT | | | | | | | | | | | |
| 1875 | 2908 | GAATCTGAATT | 2 | 2 | NC | NC | 70.90 | 45.27 | 2.36 | 2.44 | NA | NA | NA |
| | | TGGAAGTTC | | | | | | | | | | | |
| 1878 | 2911 | CTGGAATCTG | 2 | 2 | NC | NC | 68.83 | 25.87 | 1.50 | 1.22 | NA | NA | NA |
| | | AATTTGGAAG | | | | | | | | | | | |
| 1879 | 2912 | ACTGGAATCT | 2 | 2 | NC | NC | 62.97 | 111.52 | 22.17 | 6.89 | NA | NA | NA |
| | | GAATTTGGAA | | | | | | | | | | | |
| 1880 | 2913 | TACTGGAATC | 2 | 2 | NC | NC | 67.96 | 25.92 | 4.97 | 1.56 | NA | NA | NA |
| | | TGAATTTGGA | | | | | | | | | | | |
| 1881 | 2914 | CTACTGGAAT | 2 | 2 | NC | NC | 68.54 | 17.06 | 2.52 | 1.28 | 0.22 | 0.86 | 4.29 |
| | | CTGAATTTGG | | | | | | | | | | | |
| 1882 | 2915 | CCTACTGGAA | 2 | 2 | NC | NC | 73.57 | 27.67 | 6.55 | 1.77 | NA | NA | NA |
| | | TCTGAATTTG | | | | | | | | | | | |
| 1892 | 2957 | ACAAAAATCTT | 2 | 2 | NC | NC | 89.43 | 78.75 | 5.59 | 1.97 | NA | NA | NA |
| | | GTGTTAACA | | | | | | | | | | | |
| 1906 | 3003 | GGATGACACC | 2 | 3 | NC | NC | 70.86 | 222.24 | 1.88 | 14.27 | NA | NA | NA |
| | | ATTCTCTGTT | | | | | | | | | | | |
| 1907 | 3004 | GGGATGACAC | 2 | 2 | NC | NC | 76.49 | 280.50 | 3.49 | 7.46 | NA | NA | NA |
| | | CATTCTCTGT | | | | | | | | | | | |
| 1908 | 3005 | TGGGATGACA | 2 | 2 | NC | NC | 68.03 | 76.92 | 5.51 | 2.43 | NA | NA | NA |
| | | CCATTCTCTG | | | | | | | | | | | |
| 1910 | 3007 | GTTGGGATGA | 2 | 2 | NC | NC | 73.32 | 93.25 | 5.01 | 10.64 | NA | NA | NA |
| | | CACCATTCTC | | | | | | | | | | | |
| 1911 | 3008 | TGTTGGGATG | 2 | 2 | NC | NC | 76.23 | 48.47 | 6.77 | 1.44 | NA | NA | NA |
| | | ACACCATTCT | | | | | | | | | | | |
| 1912 | 3009 | ATGTTGGGAT | 2 | 2 | NC | NC | 72.48 | 66.65 | 3.78 | 1.22 | NA | NA | NA |
| | | GACACCATTC | | | | | | | | | | | |
| 1913 | 3010 | GATGTTGGGA | 2 | 3 | NC | NC | 72.20 | 97.94 | 3.79 | 9.05 | NA | NA | NA |
| | | TGACACCATT | | | | | | | | | | | |
| 1914 | 3011 | TGATGTTGGG | 2 | 2 | NC | NC | 69.42 | 43.57 | 2.16 | 3.03 | NA | NA | NA |
| | | ATGACACCAT | | | | | | | | | | | |
| 1915 | 3012 | CTGATGTTGG | 2 | 2 | NC | NC | 72.15 | 33.77 | 5.50 | 1.85 | NA | NA | NA |
| | | GATGACACCA | | | | | | | | | | | |
| 1916 | 3013 | TCTGATGTTG | 2 | 2 | NC | NC | 77.50 | 27.52 | 2.90 | 2.27 | NA | NA | NA |
| | | GGATGACACC | | | | | | | | | | | |
| 1917 | 3014 | ATCTGATGTT | 2 | 2 | NC | NC | 78.06 | 35.90 | 1.79 | 3.12 | NA | NA | NA |
| | | GGGATGACAC | | | | | | | | | | | |
| 1918 | 3015 | AATCTGATGTT | 2 | 2 | NC | NC | 79.81 | 45.61 | 4.85 | 2.12 | NA | NA | NA |
| | | GGGATGACA | | | | | | | | | | | |
| 1922 | 3019 | GCAGAATCTG | 2 | 2 | NC | NC | 80.19 | 72.76 | 4.80 | 2.76 | NA | NA | NA |
| | | ATGTTGGGAT | | | | | | | | | | | |
| 1923 | 3020 | GGCAGAATCT | 2 | 2 | NC | NC | 75.56 | 82.00 | 4.49 | 7.01 | NA | NA | NA |
| | | GATGTTGGGA | | | | | | | | | | | |
| 1924 | 3021 | TGGCAGAATC | 2 | 1 | NC | NC | 76.53 | 27.81 | 6.51 | 4.41 | NA | NA | NA |
| | | TGATGTTGGG | | | | | | | | | | | |
| 1925 | 3022 | GTGGCAGAAT | 2 | 2 | NC | NC | 77.58 | 69.65 | 6.65 | 4.52 | NA | NA | NA |
| | | CTGATGTTGG | | | | | | | | | | | |
| 1927 | 3024 | GTGTGGCAGA | 2 | 2 | NC | NC | 83.41 | 99.90 | 7.50 | 4.41 | NA | NA | NA |
| | | ATCTGATGTT | | | | | | | | | | | |
| 1945 | 3081 | TCTCTGTTGTA | 2 | 2 | NC | NC | 64.35 | 37.03 | 23.98 | 2.00 | NA | NA | NA |
| | | TTGCTGTTA | | | | | | | | | | | |
| 1946 | 3082 | TTCTCTGTTGT | 2 | 2 | NC | NC | 64.62 | 23.18 | 11.74 | 2.00 | NA | NA | NA |
| | | ATTGCTGTT | | | | | | | | | | | |
| 1947 | 3083 | GTTCTCTGTT | 2 | 2 | NC | NC | 71.29 | 64.40 | 5.04 | 6.83 | NA | NA | NA |
| | | GTATTGCTGT | | | | | | | | | | | |
| 1948 | 3084 | AGTTCTCTGTT | 2 | 1 | NC | NC | 79.95 | 65.34 | 5.20 | 4.98 | NA | NA | NA |
| | | GTATTGCTG | | | | | | | | | | | |
| 1949 | 3085 | CAGTTCTCTG | 2 | 2 | NC | NC | 77.26 | 28.90 | 9.66 | 3.12 | NA | NA | NA |
| | | TTGTATTGCT | | | | | | | | | | | |
| 1968 | 3114 | GCAATACCAA | 2 | 2 | NC | NC | 85.36 | 75.14 | 6.44 | 5.22 | NA | NA | NA |
| | | AGGAGTTTCT | | | | | | | | | | | |
| 2000 | 3162 | TGATAAGAAC | 1 | 2 | 2 | 1 | 88.43 | 21.05 | 2.07 | 0.62 | NA | NA | NA |
| | | ATCTGAATCT | | | | | | | | | | | |
| 2001 | 3163 | CTGATAAGAA | 2 | 2 | 1 | 2 | 89.58 | 25.29 | 2.86 | 7.13 | NA | NA | NA |
| | | CATCTGAATC | | | | | | | | | | | |
| 2035 | 3217 | TTCATTAACAT | 2 | 2 | NC | NC | 80.45 | 36.25 | 1.53 | 9.09 | NA | NA | NA |
| | | TCCACTGGG | | | | | | | | | | | |
| 2064 | 3247 | TTTTGGTCAC | 2 | 2 | NC | NC | 67.98 | 35.11 | 2.77 | 8.18 | NA | NA | NA |
| | | CTGTGGCATC | | | | | | | | | | | |
| 2065 | 3248 | ATTTTGGTCAC | 2 | 2 | NC | NC | 69.79 | 51.93 | 3.01 | 3.52 | NA | NA | NA |
| | | CTGTGGCAT | | | | | | | | | | | |
| 2066 | 3249 | CATTTTGGTCA | 2 | 2 | NC | NC | 76.12 | 28.42 | 5.63 | 2.67 | NA | NA | NA |
| | | CCTGTGGCA | | | | | | | | | | | |
| 2067 | 3250 | CCATTTTGGT | 2 | 3 | NC | NC | 68.04 | 33.46 | 20.39 | 2.51 | NA | NA | NA |
| | | CACCTGTGGC | | | | | | | | | | | |
| 2090 | 3285 | CTCTTGCTTTA | 2 | 1 | NC | NC | 83.53 | 9.18 | 1.81 | 2.58 | NA | NA | NA |
| | | GATTCCTCA | | | | | | | | | | | |
| 2091 | 3286 | GCTCTTGCTTT | 2 | 2 | NC | NC | 71.84 | 47.28 | 4.04 | 12.13 | NA | NA | NA |
| | | AGATTCCTC | | | | | | | | | | | |
| 2163 | 3429 | AAGCAGCCTG | 2 | 2 | NC | NC | 87.95 | 25.49 | 4.25 | 1.13 | NA | NA | NA |
| | | AATGTCCTCA | | | | | | | | | | | |
| 2165 | 3431 | ACAAGCAGCC | 2 | 2 | NC | NC | 99.44 | 110.40 | 3.74 | 5.44 | NA | NA | NA |
| | | TGAATGTCCT | | | | | | | | | | | |
| 2166 | 3432 | TACAAGCAGC | 2 | 1 | NC | NC | 97.23 | 31.29 | 6.00 | 0.83 | NA | NA | NA |
| | | CTGAATGTCC | | | | | | | | | | | |
| 2167 | 3433 | GTACAAGCAG | 2 | 2 | NC | NC | 90.96 | 76.47 | 4.29 | 17.69 | NA | NA | NA |
| | | CCTGAATGTC | | | | | | | | | | | |
| 2168 | 3434 | AGTACAAGCA | 2 | 2 | NC | NC | 102.95 | 74.55 | 23.06 | 9.33 | NA | NA | NA |
| | | GCCTGAATGT | | | | | | | | | | | |
| 2169 | 3435 | TAGTACAAGC | 3 | 2 | NC | NC | 93.15 | 26.83 | 2.25 | 2.87 | NA | NA | NA |
| | | AGCCTGAATG | | | | | | | | | | | |
| 2170 | 3436 | TTAGTACAAG | 2 | 2 | NC | NC | 83.07 | 20.20 | 4.86 | 2.24 | NA | NA | NA |
| | | CAGCCTGAAT | | | | | | | | | | | |
| 2171 | 3437 | TTTAGTACAAG | 2 | 2 | NC | NC | 81.15 | 25.05 | 3.20 | 3.65 | NA | NA | NA |
| | | CAGCCTGAA | | | | | | | | | | | |
| 2172 | 3438 | CTTTAGTACAA | 2 | 3 | NC | NC | 75.61 | 30.14 | 1.47 | 2.07 | NA | NA | NA |
| | | GCAGCCTGA | | | | | | | | | | | |
| 2173 | 3439 | TCTTTAGTACA | 2 | 2 | NC | NC | 75.65 | 50.49 | 3.75 | 1.41 | NA | NA | NA |
| | | AGCAGCCTG | | | | | | | | | | | |
| 2174 | 3440 | GTCTTTAGTAC | 2 | 2 | NC | NC | 83.92 | 81.72 | 2.88 | 2.28 | NA | NA | NA |
| | | AAGCAGCCT | | | | | | | | | | | |
| 2175 | 3441 | GGTCTTTAGT | 3 | 2 | NC | NC | 69.59 | 105.72 | 17.55 | 8.17 | NA | NA | NA |
| | | ACAAGCAGCC | | | | | | | | | | | |
| 2176 | 3442 | AGGTCTTTAG | 3 | 2 | NC | NC | 82.11 | 68.72 | 3.70 | 3.29 | NA | NA | NA |
| | | TACAAGCAGC | | | | | | | | | | | |
| 2178 | 3444 | TCAGGTCTTTA | 3 | 2 | NC | NC | 79.56 | 25.17 | 2.17 | 1.26 | NA | NA | NA |
| | | GTACAAGCA | | | | | | | | | | | |
| 2179 | 3445 | GTCAGGTCTT | 2 | 2 | NC | NC | 75.74 | 78.33 | 4.46 | 3.66 | NA | NA | NA |
| | | TAGTACAAGC | | | | | | | | | | | |
| 2181 | 3447 | TTGTCAGGTC | 2 | 2 | NC | NC | 77.68 | 27.60 | 2.41 | 3.45 | NA | NA | NA |
| | | TTTAGTACAA | | | | | | | | | | | |
| 2183 | 3449 | AGTTGTCAGG | 2 | 3 | NC | NC | 87.32 | 62.47 | 8.57 | 5.19 | NA | NA | NA |
| | | TCTTTAGTAC | | | | | | | | | | | |
| 2184 | 3450 | CAGTTGTCAG | 2 | 2 | NC | NC | 90.24 | 31.68 | 10.33 | 4.92 | NA | NA | NA |
| | | GTCTTTAGTA | | | | | | | | | | | |
| 2185 | 3451 | ACAGTTGTCA | 2 | 2 | NC | NC | 84.62 | 57.48 | 2.93 | 4.81 | NA | NA | NA |
| | | GGTCTTTAGT | | | | | | | | | | | |
| 2186 | 3452 | CACAGTTGTC | 2 | 2 | NC | NC | 81.04 | 24.63 | 3.98 | 1.43 | NA | NA | NA |
| | | AGGTCTTTAG | | | | | | | | | | | |
| 2188 | 3454 | GCCACAGTTG | 2 | 2 | NC | NC | 77.28 | 59.83 | 4.56 | 6.54 | NA | NA | NA |
| | | TCAGGTCTTT | | | | | | | | | | | |
| 2189 | 3455 | AGCCACAGTT | 2 | 2 | NC | NC | 80.32 | 54.89 | 1.38 | 5.77 | NA | NA | NA |
| | | GTCAGGTCTT | | | | | | | | | | | |
| 2194 | 3461 | ATCCACAGCC | 2 | 1 | 1 | NC | 93.62 | 32.21 | 3.07 | 2.37 | NA | NA | NA |
| | | ACAGTTGTCA | | | | | | | | | | | |
| 2196 | 3463 | ACATCCACAG | 2 | 2 | 1 | NC | 97.71 | 100.75 | 2.65 | 3.98 | NA | NA | NA |
| | | CCACAGTTGT | | | | | | | | | | | |
| 2231 | 3517 | ACAAGGTCGC | 3 | 3 | NC | NC | 96.15 | 99.00 | 3.83 | 6.99 | NA | NA | NA |
| | | TTCTAAAAGG | | | | | | | | | | | |
| 2232 | 3518 | AACAAGGTCG | 2 | 2 | NC | NC | 96.10 | 50.39 | 6.27 | 3.96 | NA | NA | NA |
| | | CTTCTAAAAG | | | | | | | | | | | |
| 2255 | 3564 | GTCTCATCAC | 2 | 2 | NC | NC | 69.15 | 21.87 | 4.29 | 1.53 | NA | NA | NA |
| | | AGTCCTCTCT | | | | | | | | | | | |
| 2256 | 3565 | TGTCTCATCA | 2 | 2 | NC | NC | 74.55 | 12.10 | 3.74 | 3.37 | 0.51 | 1.60 | 6.81 |
| | | CAGTCCTCTC | | | | | | | | | | | |
| 2305 | 3643 | ACTGGATTGT | 2 | 2 | NC | NC | 76.91 | 78.44 | 5.14 | 4.97 | NA | NA | NA |
| | | CCCATTCTGA | | | | | | | | | | | |
| 2307 | 3645 | ATACTGGATT | 2 | 2 | NC | NC | 83.27 | 18.42 | 4.00 | 3.26 | NA | NA | NA |
| | | GTCCCATTCT | | | | | | | | | | | |
| 2308 | 3646 | AATACTGGATT | 2 | 2 | NC | NC | 89.74 | 54.56 | 3.68 | 2.13 | NA | NA | NA |
| | | GTCCCATTC | | | | | | | | | | | |
| 2312 | 3650 | GGCAAATACT | 2 | 2 | NC | NC | 67.99 | 53.63 | 9.93 | 3.74 | NA | NA | NA |
| | | GGATTGTCCC | | | | | | | | | | | |
| 2319 | 3658 | GGATAACGGG | 3 | 3 | NC | NC | 84.10 | 57.31 | 13.98 | 0.63 | NA | NA | NA |
| | | CAAATACTGG | | | | | | | | | | | |
| 2321 | 3660 | CTGGATAACG | 3 | 2 | NC | NC | 80.58 | 19.76 | 1.26 | 1.57 | NA | NA | NA |
| | | GGCAAATACT | | | | | | | | | | | |
| 2333 | 3685 | CCACTGCTTA | 2 | 2 | NC | NC | 73.32 | 20.40 | 11.92 | 4.24 | NA | NA | NA |
| | | CATCAACAGC | | | | | | | | | | | |
| 2343 | 3718 | TTGTGAATTTT | 2 | 1 | NC | NC | 78.23 | 30.28 | 13.06 | 3.81 | NA | NA | NA |
| | | AACTGCTAA | | | | | | | | | | | |
| 2344 | 3719 | GTTGTGAATTT | 2 | 2 | NC | NC | 66.42 | 75.05 | 2.06 | 1.87 | NA | NA | NA |
| | | TAACTGCTA | | | | | | | | | | | |
| 2345 | 3720 | TGTTGTGAATT | 2 | 1 | NC | NC | 67.78 | 31.64 | 3.07 | 1.50 | NA | NA | NA |
| | | TTAACTGCT | | | | | | | | | | | |
| 2346 | 3721 | ATGTTGTGAAT | 2 | 2 | NC | NC | 74.39 | 45.73 | 5.60 | 1.64 | NA | NA | NA |
| | | TTTAACTGC | | | | | | | | | | | |
| 2347 | 3722 | GATGTTGTGA | 2 | 2 | NC | NC | 69.84 | 80.44 | 3.44 | 4.12 | NA | NA | NA |
| | | ATTTTAACTG | | | | | | | | | | | |
| 2348 | 3723 | AGATGTTGTG | 2 | 1 | NC | NC | 73.52 | 56.41 | 4.60 | 2.09 | NA | NA | NA |
| | | AATTTTAACT | | | | | | | | | | | |
| 2349 | 3724 | AAGATGTTGT | 2 | 1 | NC | NC | 85.86 | 61.92 | 1.65 | 2.53 | NA | NA | NA |
| | | GAATTTTAAC | | | | | | | | | | | |
| 2353 | 3745 | TTGGTGAAAC | 3 | 2 | NC | NC | 86.80 | 31.94 | 2.61 | 2.18 | NA | NA | NA |
| | | GATAGGGATA | | | | | | | | | | | |
| 2354 | 3746 | TTTGGTGAAA | 3 | 2 | NC | NC | 87.43 | 48.40 | 2.51 | 2.09 | NA | NA | NA |
| | | CGATAGGGAT | | | | | | | | | | | |
| 2355 | 3747 | CTTTGGTGAA | 3 | 2 | NC | NC | 79.57 | 41.96 | 2.83 | 9.43 | NA | NA | NA |
| | | ACGATAGGGA | | | | | | | | | | | |
| 2394 | 3807 | TCAAACAGGC | 2 | 2 | NC | NC | 85.98 | 17.77 | 3.56 | 0.98 | NA | NA | NA |
| | | AATAAACTTG | | | | | | | | | | | |
| 2395 | 3808 | ATCAAACAGG | 2 | 2 | NC | NC | 77.20 | 34.29 | 3.93 | 5.96 | NA | NA | NA |
| | | CAATAAACTT | | | | | | | | | | | |
| 2402 | 3815 | AGTGCTCATC | 2 | 2 | NC | NC | 71.00 | 59.57 | 3.50 | 2.67 | NA | NA | NA |
| | | AAACAGGCAA | | | | | | | | | | | |
| 2403 | 3816 | TAGTGCTCAT | 2 | 3 | NC | NC | 73.32 | 22.08 | 4.57 | 1.81 | NA | NA | NA |
| | | CAAACAGGCA | | | | | | | | | | | |
| 2404 | 3817 | TTAGTGCTCAT | 2 | 3 | NC | NC | 67.42 | 18.47 | 3.66 | 3.11 | 0.11 | 0.52 | 4.24 |
| | | CAAACAGGC | | | | | | | | | | | |
| 2460 | 3953 | TTTCCGACCA | 2 | 3 | NC | NC | 68.68 | 26.50 | 3.08 | 2.92 | NA | NA | NA |
| | | GAGCCTTGTG | | | | | | | | | | | |
| 2461 | 3954 | TTTTCCGACC | 2 | 3 | NC | NC | 72.55 | 21.26 | 8.32 | 1.45 | NA | NA | NA |
| | | AGAGCCTTGT | | | | | | | | | | | |
| 2462 | 3955 | TTTTTCCGACC | 2 | 2 | NC | NC | 80.37 | 21.01 | 7.60 | 0.85 | NA | NA | NA |
| | | AGAGCCTTG | | | | | | | | | | | |
| 2489 | 4007 | TTCCTCTGTCA | 2 | 2 | NC | NC | 70.56 | 20.33 | 4.00 | 2.58 | NA | NA | NA |
| | | CTGTTATCT | | | | | | | | | | | |
| 2490 | 4008 | GTTCCTCTGT | 2 | 2 | NC | NC | 57.22 | 45.09 | 3.16 | 4.14 | NA | NA | NA |
| | | CACTGTTATC | | | | | | | | | | | |
| 2491 | 4009 | TGTTCCTCTGT | 2 | 2 | NC | NC | 46.82 | 19.73 | 5.54 | 1.38 | 0.81 | 2.08 | 8.70 |
| | | CACTGTTAT | | | | | | | | | | | |
| 2492 | 4010 | TTGTTCCTCTG | 2 | 2 | NC | NC | 80.76 | 17.70 | 5.97 | 2.11 | NA | NA | NA |
| | | TCACTGTTA | | | | | | | | | | | |
| 2495 | 4013 | CCTTTGTTCCT | 2 | 2 | NC | NC | 76.11 | 27.57 | 3.18 | 1.96 | NA | NA | NA |
| | | CTGTCACTG | | | | | | | | | | | |
| 2499 | 4017 | GTCTCCTTTGT | 2 | 1 | NC | NC | 74.25 | 27.62 | 5.34 | 2.50 | NA | NA | NA |
| | | TCCTCTGTC | | | | | | | | | | | |
| 2500 | 4018 | AGTCTCCTTT | 2 | 2 | NC | NC | 77.94 | 41.70 | 4.52 | 3.15 | NA | NA | NA |
| | | GTTCCTCTGT | | | | | | | | | | | |
| 2524 | 4055 | GCCCAGATCT | 2 | 2 | NC | NC | 76.59 | 23.44 | 6.97 | 5.81 | NA | NA | NA |
| | | TCCAGATTTT | | | | | | | | | | | |
| 2525 | 4056 | GGCCCAGATC | 2 | 3 | NC | NC | 79.60 | 24.75 | 7.75 | 4.87 | NA | NA | NA |
| | | TTCCAGATTT | | | | | | | | | | | |
| 2526 | 4057 | AGGCCCAGAT | 2 | 2 | NC | NC | 87.17 | 42.54 | 6.66 | 2.40 | NA | NA | NA |
| | | CTTCCAGATT | | | | | | | | | | | |
| 2527 | 4058 | AAGGCCCAGA | 2 | 1 | NC | NC | 74.99 | 24.17 | 4.99 | 1.25 | NA | NA | NA |
| | | TCTTCCAGAT | | | | | | | | | | | |
| 2528 | 4059 | CAAGGCCCAG | 2 | 2 | NC | NC | 69.53 | 12.61 | 6.77 | 1.96 | 0.19 | 0.78 | 3.63 |
| | | ATCTTCCAGA | | | | | | | | | | | |
| 2529 | 4060 | TCAAGGCCCA | 2 | 2 | NC | NC | 79.06 | 11.16 | 6.66 | 1.99 | NA | NA | NA |
| | | GATCTTCCAG | | | | | | | | | | | |
| 2530 | 4061 | TTCAAGGCCC | 2 | 2 | NC | NC | 71.09 | 10.79 | 15.83 | 1.14 | 0.67 | 2.40 | 8.30 |
| | | AGATCTTCCA | | | | | | | | | | | |
| 2561 | 4092 | CCAGAGAATC | 2 | 2 | NC | NC | 75.02 | 18.73 | 1.75 | 3.89 | NA | NA | NA |
| | | ACTAGTGTCT | | | | | | | | | | | |
| 2562 | 4093 | ACCAGAGAAT | 2 | 2 | NC | NC | 83.46 | 32.29 | 4.66 | 2.17 | NA | NA | NA |
| | | CACTAGTGTC | | | | | | | | | | | |
| 2591 | 4142 | TTCATTGGCTT | 2 | 1 | NC | NC | 100.38 | 16.31 | 8.53 | 1.96 | NA | NA | NA |
| | | CTCTTTCCA | | | | | | | | | | | |
| 2595 | 4146 | GAAGTTCATT | 2 | 2 | NC | NC | 80.58 | 38.80 | 10.34 | 1.73 | NA | NA | NA |
| | | GGCTTCTCTT | | | | | | | | | | | |
| 2616 | 4177 | ATACTCTTGGT | 2 | 2 | NC | NC | 106.26 | 20.10 | 17.09 | 2.60 | NA | NA | NA |
| | | CACAGTAGA | | | | | | | | | | | |
| 2644 | 4244 | CAATGTCCCT | 2 | 2 | NC | NC | 77.84 | 12.14 | 15.18 | 0.55 | NA | NA | NA |
| | | TGGATGCCTC | | | | | | | | | | | |
| 2645 | 4245 | GCAATGTCCC | 2 | 2 | NC | NC | 60.68 | 31.07 | 16.38 | 3.72 | NA | NA | NA |
| | | TTGGATGCCT | | | | | | | | | | | |
| 2646 | 4247 | TGGCAATGTC | 2 | 2 | NC | NC | 70.78 | 15.47 | 2.39 | 2.28 | 0.07 | 0.30 | 1.71 |
| | | CCTTGGATGC | | | | | | | | | | | |
| 2647 | 4248 | GTGGCAATGT | 2 | 1 | NC | NC | 69.26 | 31.74 | 1.13 | 3.38 | NA | NA | NA |
| | | CCCTTGGATG | | | | | | | | | | | |
| 2648 | 4249 | AGTGGCAATG | 3 | 2 | NC | NC | 90.27 | 38.94 | 11.22 | 2.21 | NA | NA | NA |
| | | TCCCTTGGAT | | | | | | | | | | | |
| 2649 | 4250 | CAGTGGCAAT | 2 | 1 | NC | NC | 77.65 | 23.04 | 6.54 | 2.25 | NA | NA | NA |
| | | GTCCCTTGGA | | | | | | | | | | | |
| 2650 | 4251 | TCAGTGGCAA | 2 | 2 | NC | NC | 85.94 | 20.36 | 8.42 | 1.96 | NA | NA | NA |
| | | TGTCCCTTGG | | | | | | | | | | | |
| 2651 | 4252 | GTCAGTGGCA | 2 | 2 | NC | NC | 85.16 | 27.43 | 7.37 | 2.02 | NA | NA | NA |
| | | ATGTCCCTTG | | | | | | | | | | | |
| 2653 | 4254 | CAGTCAGTGG | 2 | 2 | NC | NC | 93.15 | 17.75 | 10.65 | 4.43 | NA | NA | NA |
| | | CAATGTCCCT | | | | | | | | | | | |
| 2654 | 4255 | ACAGTCAGTG | 2 | 2 | NC | NC | 96.92 | 27.17 | 5.79 | 3.70 | NA | NA | NA |
| | | GCAATGTCCC | | | | | | | | | | | |
| 2661 | 4262 | CTTCTGGACA | 2 | 2 | 2 | NC | 88.73 | 25.80 | 4.68 | 2.02 | NA | NA | NA |
| | | GTCAGTGGCA | | | | | | | | | | | |
| 2662 | 4264 | ACCTTCTGGA | 2 | 3 | 2 | NC | 80.03 | 24.32 | 11.32 | 1.04 | NA | NA | NA |
| | | CAGTCAGTGG | | | | | | | | | | | |
| 2663 | 4265 | CACCTTCTGG | 2 | 2 | 1 | NC | 84.78 | 19.26 | 5.85 | 0.82 | NA | NA | NA |
| | | ACAGTCAGTG | | | | | | | | | | | |
| 2664 | 4266 | ACACCTTCTG | 2 | 2 | 2 | NC | 88.41 | 20.19 | 9.00 | 1.26 | NA | NA | NA |
| | | GACAGTCAGT | | | | | | | | | | | |
| 2666 | 4270 | GCCAACACCT | 2 | 3 | 2 | 2 | 70.57 | 59.95 | 5.04 | 11.62 | NA | NA | NA |
| | | TCTGGACAGT | | | | | | | | | | | |
| 2674 | 4279 | GCTTGGGATG | 2 | 2 | NC | NC | 60.17 | 36.14 | 1.75 | 4.07 | NA | NA | NA |
| | | CCAACACCTT | | | | | | | | | | | |
| 2683 | 4331 | GCAACTTTCC | 2 | 1 | NC | NC | 73.18 | 40.51 | 1.94 | 4.45 | NA | NA | NA |
| | | TGTAAGCTCA | | | | | | | | | | | |
| 2684 | 4332 | GGCAACTTTC | 2 | 2 | NC | NC | 73.71 | 24.96 | 1.41 | 4.04 | NA | NA | NA |
| | | CTGTAAGCTC | | | | | | | | | | | |
| 2685 | 4333 | CGGCAACTTT | 2 | 2 | NC | NC | 72.28 | 42.00 | 3.03 | 4.43 | NA | NA | NA |
| | | CCTGTAAGCT | | | | | | | | | | | |
| 2686 | 4334 | GCGGCAACTT | 2 | 2 | NC | NC | 73.11 | 53.99 | 4.51 | 5.22 | NA | NA | NA |
| | | TCCTGTAAGC | | | | | | | | | | | |
| 2687 | 4335 | GGCGGCAACT | 2 | 3 | NC | NC | 71.34 | 43.45 | 2.25 | 2.01 | NA | NA | NA |
| | | TTCCTGTAAG | | | | | | | | | | | |
| 2688 | 4336 | AGGCGGCAAC | 2 | 3 | NC | NC | 69.70 | 64.52 | 3.46 | 4.27 | NA | NA | NA |
| | | TTTCCTGTAA | | | | | | | | | | | |
| 2689 | 4337 | AAGGCGGCAA | 2 | 3 | NC | NC | 71.47 | 58.98 | 2.65 | 5.60 | NA | NA | NA |
| | | CTTTCCTGTA | | | | | | | | | | | |
| 2690 | 4338 | TAAGGCGGCA | 3 | 2 | NC | NC | 74.69 | 43.99 | 7.35 | 10.52 | NA | NA | NA |
| | | ACTTTCCTGT | | | | | | | | | | | |
| 2691 | 4339 | ATAAGGCGGC | 3 | 3 | NC | NC | 78.56 | 42.65 | 5.65 | 5.21 | NA | NA | NA |
| | | AACTTTCCTG | | | | | | | | | | | |
| 2692 | 4340 | AATAAGGCGG | 2 | 2 | NC | NC | 89.94 | 64.68 | 2.17 | 4.62 | NA | NA | NA |
| | | CAACTTTCCT | | | | | | | | | | | |
| 2693 | 4341 | CAATAAGGCG | 2 | 2 | NC | NC | 94.34 | 21.32 | 2.79 | 0.66 | NA | NA | NA |
| | | GCAACTTTCC | | | | | | | | | | | |
| 2694 | 4342 | TCAATAAGGC | 2 | 2 | NC | NC | 90.44 | 18.79 | 5.41 | 2.47 | NA | NA | NA |
| | | GGCAACTTTC | | | | | | | | | | | |
| 2695 | 4343 | TTCAATAAGG | 2 | 2 | NC | NC | 96.91 | 21.42 | 6.53 | 3.19 | NA | NA | NA |
| | | CGGCAACTTT | | | | | | | | | | | |
| 2725 | 4423 | AAGTGGTCTA | 2 | 3 | NC | NC | 103.47 | 34.92 | 18.44 | 5.10 | NA | NA | NA |
| | | TGTCAGCTAA | | | | | | | | | | | |
| 2726 | 4424 | CAAGTGGTCT | 3 | 3 | NC | NC | 89.60 | 27.45 | 11.00 | 6.09 | NA | NA | NA |
| | | ATGTCAGCTA | | | | | | | | | | | |
| 2727 | 4425 | CCAAGTGGTC | 2 | 2 | NC | NC | 81.51 | 20.32 | 8.29 | 3.05 | NA | NA | NA |
| | | TATGTCAGCT | | | | | | | | | | | |
| 2728 | 4426 | TCCAAGTGGT | 2 | 2 | NC | NC | 92.66 | 17.90 | 18.04 | 1.23 | NA | NA | NA |
| | | CTATGTCAGC | | | | | | | | | | | |
| 2777 | 4475 | GGCCATTTTG | 2 | 2 | NC | NC | 78.11 | 21.08 | 3.67 | 2.43 | NA | NA | NA |
| | | CGAAGTTTAG | | | | | | | | | | | |
| 2778 | 4476 | GGGCCATTTT | 3 | 3 | NC | NC | 73.18 | 17.87 | 4.11 | 1.66 | NA | NA | NA |
| | | GCGAAGTTTA | | | | | | | | | | | |
| 2779 | 4477 | TGGGCCATTT | 2 | 3 | NC | NC | 76.21 | 21.60 | 5.41 | 3.30 | NA | NA | NA |
| | | TGCGAAGTTT | | | | | | | | | | | |
| 2780 | 4478 | CTGGGCCATT | 2 | 3 | NC | NC | 78.35 | 23.66 | 5.34 | 2.29 | NA | NA | NA |
| | | TTGCGAAGTT | | | | | | | | | | | |
| 2781 | 4479 | CCTGGGCCAT | 2 | 3 | NC | NC | 77.45 | 30.09 | 4.91 | 2.39 | NA | NA | NA |
| | | TTTGCGAAGT | | | | | | | | | | | |
| 2782 | 4498 | TTTCCAAAGA | 2 | 2 | NC | NC | 84.94 | 25.18 | 4.09 | 2.62 | NA | NA | NA |
| | | GACGCCAGGC | | | | | | | | | | | |
| 2784 | 4500 | CTTTTCCAAAG | 2 | 2 | NC | NC | 88.49 | 23.15 | 2.79 | 2.49 | NA | NA | NA |
| | | AGACGCCAG | | | | | | | | | | | |
| 2785 | 4501 | GCTTTTCCAAA | 2 | 2 | NC | NC | 82.32 | 26.63 | 4.10 | 2.04 | NA | NA | NA |
| | | GAGACGCCA | | | | | | | | | | | |
| 2789 | 4505 | CTCTGCTTTTC | 2 | 2 | NC | NC | 83.50 | 37.28 | 7.11 | 8.40 | NA | NA | NA |
| | | CAAAGAGAC | | | | | | | | | | | |
| 2791 | 4508 | ACACTCTGCT | 2 | 2 | NC | NC | 73.84 | 20.07 | 19.34 | 2.81 | NA | NA | NA |
| | | TTTCCAAAGA | | | | | | | | | | | |
| 2792 | 4509 | CACACTCTGC | 2 | 2 | NC | NC | 79.18 | 14.66 | 2.80 | 0.76 | NA | NA | NA |
| | | TTTTCCAAAG | | | | | | | | | | | |
| 2794 | 4511 | ATCACACTCT | 2 | 1 | NC | NC | 78.29 | 17.01 | 3.86 | 3.71 | NA | NA | NA |
| | | GCTTTTCCAA | | | | | | | | | | | |
| 2795 | 4512 | TATCACACTCT | 2 | 2 | NC | NC | 93.31 | 19.05 | 0.79 | 2.98 | NA | NA | NA |
| | | GCTTTTCCA | | | | | | | | | | | |
| 2797 | 4514 | TGTATCACACT | 2 | 2 | NC | NC | 97.20 | 16.90 | 2.92 | 0.94 | NA | NA | NA |
| | | CTGCTTTTC | | | | | | | | | | | |
| 2848 | 4672 | AGGGACACTG | 2 | 2 | NC | NC | 94.48 | 45.86 | 2.48 | 0.73 | NA | NA | NA |
| | | GGCTGATTCA | | | | | | | | | | | |
| 2849 | 4683 | CTAAGCTGCT | 2 | 2 | NC | NC | 81.53 | 19.47 | 9.03 | 2.11 | NA | NA | NA |
| | | CAGGGACACT | | | | | | | | | | | |
| 2850 | 4684 | TCTAAGCTGC | 2 | 2 | NC | NC | 81.17 | 21.06 | 7.52 | 1.31 | NA | NA | NA |
| | | TCAGGGACAC | | | | | | | | | | | |
| 2851 | 4685 | GTCTAAGCTG | 2 | 1 | NC | NC | 76.71 | 30.35 | 7.66 | 6.99 | NA | NA | NA |
| | | CTCAGGGACA | | | | | | | | | | | |
| 2852 | 4686 | TGTCTAAGCT | 2 | 2 | NC | NC | 87.76 | 29.98 | 8.64 | 2.25 | NA | NA | NA |
| | | GCTCAGGGAC | | | | | | | | | | | |
| 2917 | 4787 | CATGGATGCA | 2 | 2 | NC | NC | 80.58 | 21.83 | 5.14 | 6.54 | NA | NA | NA |
| | | AATGAATGAA | | | | | | | | | | | |
| 2918 | 4788 | CCATGGATGC | 2 | 2 | NC | NC | 73.11 | 25.80 | 8.72 | 2.66 | NA | NA | NA |
| | | AAATGAATGA | | | | | | | | | | | |

### Example 3. In Vitro Screen for Reduced Expansion

[0343] Expansion of DNA triplet repeats can be replicated in vitro using patient-derived cells lines and DNA-damaging agents. Human fibroblasts from Huntington's (GM04281, GM04687 and GM04212) or Friedreich's Ataxia patients (GM03816 and GM02153) or Myotonic Dystrophy) (GM04602, GM03987 and GM03989) are purchased from Coriell Cell Repositories and are maintained in medium following the manufacturer's instructions (Kovtum et al., 2007 Nature, 447(7143): 447-452; Li et al., 2016 Biopreservation and Biobanking 14(4):324-29; Zhang et al., 2013 Mol Ther 22(2): 312-320). To induce CAG-repeat expansion in vitro, fibroblast cells are treated with oxidizing agents such as hydrogen peroxide (H₂O₂), potassium chromate (K₂CrO₄) or potassium bromate (KBrO₃) for up to 2 hrs (Kovtum et al., ibid). Cells are washed, and medium replace to allow cells to recover for 3 days. The treatment is repeated up to twice more before cells are harvested and DNA isolated. CAG repeat length is determined using methods described below.

[0344] Expansion of DNA triplet repeats can be replicated in vitro using patient-derived cell lines. Induced pluripotent stem cells (iPSC) derived from Human fibroblasts from Huntington's Patients (CS09iHD-109n1) are purchased from Cedars-Sinai RMI Induced Pluripotent Stem Cell Core and are maintained following the manufacturer's recommendations (https://www.cedars-sinai.org/content/dam/cedars-sinai/research/documents/biomanufacturing/recommended-guidelines-for-handling-ipscsv1.pdf). The CAG repeat from an iPSC line with 109 CAGs shows an increase in CAG repeat size over time, with an average expansion of 4 CAG repeats over 70 days in dividing iPS cells (Goold et al., 2019 Human Molecular Genetics February 15; 28(4): 650-661).

[0345] CS09iHD-109n1 iPSC are treated with ASO for continuous knockdown of target mRNA and CAG repeat expansion is determined by DNA fragment analysis described below. ASOs are added to cells in varying concentrations every 3 to 15 days and knockdown of mRNA is determined by RT-qPCR using standard molecular biology techniques. DNA and mRNA are isolated from cells according to standard techniques at t=0.14 days, 28 days, 42 days, 56 days and 80 days. The differences in expansion between treatment and control are compared according to a linear repeated-measures model, and at each time point according to Tukey's post-hoc tests.

### Example 4

[0346] Genomic DNA Extraction and Quantitation of CAG Repeat Length by Small Pool-PCR (sp-PCR) Analyses

[0347] Genomic DNA is purified using standard Proteinase K digestions and extracted using DNAzol (Invitrogen) following the manufacturer's instructions. CAG repeat length is determined by small pool-PCR analyses as previously described (Mario Gomes-Pereira and Darren Monckton, 2017, Front Cell Neuro 11:153). In brief, DNA is digested with HindIII, diluted to a final concentration between 1-6 pg/μl and approximately 10 pg was used in subsequent PCR reactions. Primer flaking Exon 1 of the human HTT are used to amplify the CAG alleles and the PCR product is resolved by electrophoresis. Subsequently, Southern blot hybridization is performed, and the CAG alleles are observed by autoradiography OR visualized with ethidium bromide staining. CAG length can be measured directly by sequencing on a MiSeQ or appropriate machine. The change in CAG repeat number in various treatment groups in comparison with controls is calculated using simple descriptive statistics (e.g. mean±standard deviation).

[0348] Genomic DNA Extraction and Quantitation of CAG Repeat Length by DNA Fragment Analyses

[0349] Genomic DNA is purified using DNAeasy Blood and Tissue Kit (Qiagen) following the manufacturer's instructions. DNA is quantified by Qubit dsDNA assay (ThemoScientific) and CAG repeat length is determined by fragment analysis by Laragen (Culver City, Calif.)

### Example 5. Mouse Studies

[0350] Natural History Studies in HD Mouse Models:

[0351] The HD mouse R6/2 line is transgenic for the 5′ end of the human HD gene (HTT) carrying approximately 120 CAG repeat expansions. HTT is ubiquitously expressed. Transgenic mice exhibit a progressive neurological phenotype that mimics many of the pathological features of HD, including choreiform-like movements, involuntary stereotypic movements, tremor, and epileptic seizures, as well as nonmovement disorder components, including unusual vocalization. They urinate frequently and exhibit loss of body weight and muscle bulk through the course of the disease. Neurologically these mice develop Neuronal Intranuclear Inclusions (NII) which contain both the huntingtin and ubiquitin proteins. Previously unknown, these NII have subsequently been identified in HD patients. The age of onset for development of HD symptoms in R6/2 mice has been reported to occur between 9 and 11 weeks (Mangiarini et al., 1996 Cell 87: 493-506).

[0352] Somatic expansions were reported in R6/2 mice striatum, cortex and liver. Somatic instability increased with higher constitutive length (Larson et al, Neurobiology of Disease 76 (2015) 98-111). A natural history study in R6/2 mice with 120 CAG repeats was performed. Their genotype and length of CAG expansion was determined. R6/2 mice at 4, 8, 12 and 16 weeks of age (4 male and 4 female mice per age group) were sacrificed. Striatum, cerebellum, cortex, liver, kidney, heart, spleen, lung, duodenum, colon, quadricep, CSF and plasma were collected and snap frozen in liquid nitrogen. Genomic DNA was extracted, the length of CAG repeats measured, and the instability index was calculated from striatum, cerebellum, cortex, liver and kidney according to Lee et al. BMC Systems Biology 2010, 4:29). At 12 and 16 weeks of age, the striatum showed a significant increase of somatic expansion as measured by the instability index (****p<0.0001, One-way ANOVA) (FIG. 1). No changes in somatic expansion were observed across all ages in the R6/2 mouse cerebellum (FIG. 2).

[0353] Mouse models recapitulating many of the features of trinucleotide repeat expansion diseases including, HD, FA and DM1, are readily available from commercial venders and academic institutions (Polyglutamine Disorders, Advances in Experimental Medicine and Biology, Vol 1049, 2018: Editors Clevio Nobrega and Lois Pereira de Almeida, Springer). All mouse experiments are conducted in accordance with local IACUC guidelines. Three examples of different diseased mouse models and how they could be used to investigate the usefulness of pharmacological intervention against MLH3 for somatic expansion are included below.

[0354] In Huntington's research, several transgenic and knock-in mouse models were generated to investigate the underlying pathological mechanisms involved in the disease. For example, the R6/2 transgenic mouse contains a transgene of ˜1.9 kb of human HTT containing 144 copies of the CAG repeat (Mangiarini et al., 1996 Cell 87: 493-506) while the HdhQ111 model was generated by replacing the mouse HTT exon 1 with a human exon1 containing 111 copies of the CAG repeat (Wheeler et al., 2000 Hum Mol Genet 9:503-513). Both the R6/2 and HdhQ111 models replicate many of the features of human HD including motor and behavioral dysfunctions, neuronal loss, as well as the expansion of CAG repeats in the striatum (Pouladi et al., 2013, Nature Reviews Neuroscience 14: 708-721; Mangiarini et al., 1997 Nature Genet 15: 197-200; Wheeler et al., Hum Mol Genet 8: 115-122).

[0355] R6/2 mice are genotyped using DNA derived from tail snips at weaning and the CAG repeat size is determined. Mice are randomized into groups (n=12/group) at weaning at 4 wks old and dosed with monthly (week 4 and 8) ICV injection of either PBS (control) or up to a 500 μg dose of oligos targeting MLH3. A series of oligos targeting different regions of MLH3 can be tested to identify the most efficacious oligo sequence in vivo. At 12 weeks of age, mice are euthanized, and tissues extracted for analyses. The list of tissues includes, but not restricted to, striatum, cortex, cerebellum, and liver. Genomic DNA is extracted and the length of CAG repeats measured as described below. CSF and plasma are collected for biomarker analysis. Additional pertinent mouse models of HD can be considered.

[0356] In Friedreich Ataxia, the YG8 FRDA transgenic mouse model is commonly used to understand the pathology (Al-Mandawi et al., 2006 Genomics 88(5)580-590; Bourn et al., 2012 PLOS One 7(10); e47085). This model was generated through the insertion of a human YAC transgenic containing in the background of a null FRDA mouse. The YG8 model demonstrates somatic expansion of the GAA triplet repeat expansion in neuronal tissues with only mild motor defects. YG8 FRDA mice are genotyped using DNA derived from tail snips at weaning and the CAG repeat size is determined using methods. To determine if MLH3 plays a role in somatic expansion of the disease allele, hemizygous YG8 FRDA animals are administered ICV with oligos targeting knockdown of MLH3 identified above.

[0357] Approximately 2 months later, animals are euthanized and tissues collected for molecular analyses. Suitable tissues are heart, quadriceps, dorsal root ganglia (DRG's), cerebellum, kidney, and liver. Genomic DNA is extracted, and the length of CAG repeats measured as described above in Example 4.

[0358] In Myotonic Dystrophy, the DM300-328 transgenic mouse model is suitable for investigating the pathology behind DM1. This mouse model has a large human genomic sequence (˜45 kb) containing over 300 CTG repeats and displays both the somatic expansion and degenerative muscle changes observed in human DM1 (Seznec et al., 2000; Tome et al., 2009 PLOS Genetics 5(5): e1000482; Pandey et al., 2015 J Pharmacol Exp Ther 355:329-340). DM300-328 mice are genotyped using DNA derived from tail snips at weaning and the CAG repeat size is determined. To determine if MLH3 plays a role in somatic expansion of the disease allele in myotonic dystrophy, DM300-328 transgenic animals are administered ASOs targeting knockdown of MLH3 by either subcutaneous injections (sc), intraperitoneal (ip) or intravenous tail injections (iv). Mice are administered ASOs up to 2×/week for maximum 8 weeks of treatment. Animals are euthanized at multiple time points and tissues collected for molecular analyses. Suitable tissues are quadriceps, heart, diaphragm, cortex, cerebellum, sperm, kidney, and liver. Genomic DNA is extracted and the length of CAG repeats measured and compared with parallel controls.

[0359] The Hdh^{Q111} mouse model for Huntington Disease is a heterozygous knock-in line, in which the majority of exon 1 and part of intron 1 on one allele of the huntingtin gene (i.e., HTT or Huntington Disease gene) are replaced with human DNA containing ˜111 CAG repeats. In this example, ASOs to knock down MLH3 activity or levels is administered. After a treatment period, brain tissue from treated or untreated mice is isolated (e.g., striatum tissue) and analyzed using qRT-PCR as previously described to determine RNA levels of MLH3. Huntingtin gene repeat analysis is performed using mouse tissues (e.g., striatum tissue) after a treatment period using a human-specific PCR assay that amplifies the HTT CAG repeat from the knock-in allele but does not amplify the mouse sequence (i.e., the wild type allele). In this protocol, the forward primer is fluorescently labeled (e.g., with 6-FAM as described previously, for example Pinto R M, Dragileva E, Kirby A, et al. Mismatch repair genes MLH1 and MLH3 modify CAG instability in Huntington's disease mice: genome-wide and candidate approaches. PLoS Genet. 2013; 9(10):e1003930.), and products can be resolved using an analyzer with comparison against an internal size standard to generate CAG repeat size distribution traces. Repeat size is determined from the peak with the greatest intensity from a control tissue (e.g., tail tissue in a mouse) and from an affected tissue (e.g., brain striatum tissue or brain cortex tissue). Immunohistochemistry is carried out with polyclonal anti-huntingtin antibody (e.g., EM48) on paraffin-embedded or otherwise prepared sections of brain tissue and can be quantified using a standardized staining index to capture both nuclear staining intensity and number of stained nuclei. A decrease in repeat size in affected tissue indicates that the agent that reduces the level and/or activity of MLH3 is capable of decreasing the repeat which are responsible for the toxic and/or defective gene products in Huntington's disease.

### Other Aspects

[0360] All publications, patents, and patent applications mentioned in this specification are incorporated herein by reference in their entirety to the same extent as if each individual publication, patent, or patent application was specifically and individually indicated to be incorporated by reference in its entirety. Where a term in the present application is found to be defined differently in a document incorporated herein by reference, the definition provided herein is to serve as the definition for the term.

[0361] While the invention has been described in connection with specific aspects thereof, it will be understood that invention is capable of further modifications and this application is intended to cover any variations, uses, or adaptations of the invention following, in general, the principles of the invention and including such departures from the present disclosure that come within known or customary practice within the art to which the invention pertains and can be applied to the essential features hereinbefore set forth, and follows in the scope of the claimed.

[0362] In addition to the various aspects described herein, the present disclosure includes the following aspects numbered E1 through E90. This list of aspects is presented as an exemplary list and the application is not limited to these aspects.

[0363] E1. A single-stranded oligonucleotide of 10-30 linked nucleosides in length, wherein the oligonucleotide comprises a region of at least 10 contiguous nucleobases having at least 80% complementarity to an MLH3 gene.

[0364] E2. The oligonucleotide of E1, wherein the oligonucleotide comprises: (a) a DNA core sequence comprising linked deoxyribonucleosides; (b) a 5′ flanking sequence comprising linked nucleosides; and (c) a 3′ flanking sequence comprising linked nucleosides; wherein the DNA core comprises a region of at least 10 contiguous nucleobases having at least 80% complementarity to an MLH3 gene and is positioned between the 5′ flanking sequence and the 3′ flanking sequence; wherein the 5′ flanking sequence and the 3′ flanking sequence each comprises at least two linked nucleosides; and wherein at least one nucleoside of each flanking sequence comprises an alternative nucleoside.

[0365] E3. A single-stranded oligonucleotide of 10-30 linked nucleosides in length for inhibiting expression of a human MLH3 gene in a cell, wherein the oligonucleotide comprises a region of at least 10 contiguous nucleobases having at least 80% complementarity to an MLH3 gene.

[0366] E4. The oligonucleotide of E3, wherein the oligonucleotide comprises: (a) a DNA core comprising linked deoxyribonucleosides; (b) a 5′ flanking sequence comprising linked nucleosides; and (c) a 3′ flanking sequence comprising linked nucleosides; wherein the DNA core comprises a region of at least 10 contiguous nucleobases having at least 80% complementarity to an MLH3 gene and is positioned between the 5′ flanking sequence and the 3′ flanking sequence; wherein the 5′ flanking sequence and the 3′ flanking sequence each comprises at least two linked nucleosides; and wherein at least one nucleoside of each flanking sequence comprises an alternative nucleoside.

[0367] E5. The oligonucleotide of any one of E1-E4, wherein the region of at least 10 nucleobases has at least 90% complementary to an MLH3 gene.

[0368] E6. The oligonucleotide of any one of E1-E5, wherein the region of at least 10 nucleobases has at least 95% complementary to an MLH3 gene.

[0369] E7. The oligonucleotide of any one of E1-E6, wherein the region of at least 10 nucleobases is complementary to an MLH3 gene corresponding to a sequence of reference mRNA NM_001040108.1 at one or more of positions 221-293, 321-506, 534-576, 584-636, 681-740, 818-878, 952-1024, 1129-1158, 1177-1264, 1287-1318, 1351-1378, 1536-1598, 1623-1660, 1739-1764, 1782-1823, 1847-1908, 2026-2051, 2063-2094, 2115-2146, 2256-2290, 2387-2414, 2421-2592, 2727-2788, 2826-2937, 3005-3043, 3078-3107, 3159-3185, 3214-3239, 3244-3272, 3282-3308, 3426-3483, 3561-3587, 3642-3769, 3804-3839, 3950-3977, 4004-4040, 4052-4115, 4139-4199, 4241-4301, 4328-4365, 4420-4448, 4472-4536, 4669-4708, or 4784-4810 of the MLH3 gene.

[0370] E8. The oligonucleotide of any one of E1-E6, wherein the region of at least 10 nucleobases is complementary to an MLH3 gene corresponding to a sequence of reference mRNA NM_001040108.1 at one or more of positions 221-293, 321-506, 534-576, 584-636, 681-740, 818-878, 952-1024, 1129-1158, 1177-1264, 1287-1318, 1351-1378, 1568-1598, 1623-1660, 1782-1823, 1870-1904, 2063-2094, 2115-2146, 2256-2287, 2387-2414, 2422-2592, 2727-2788, 2826-2937, 3009-3043, 3078-3107, 3159-3185, 3214-3272, 3282-3307, 3426-3483, 3561-3587, 3642-3767, 3804-3839, 3950-3977, 4004-4039, 4052-4115, 4139-4199, 4241-4301, 4329-4365, 4420-4448, 4472-4536, 4680-4708, or 4784-4810 of the MLH3 gene.

[0371] E9. The oligonucleotide of any one of E1-E6, wherein the region of at least 10 nucleobases is complementary to an MLH3 gene corresponding to a sequence of reference mRNA NM_001040108.1 at one or more of positions 221-293, 321-506, 534-635, 681-740, 842-875, 953-1024, 1129-1158, 1179-1264, 1287-1316, 1351-1378, 1568-1598, 1623-1659, 1782-1823, 1870-1904, 2064-2091, 2115-2146, 2256-2287, 2387-2414, 2422-2592, 2727-2788, 2829-2937, 3010-3043, 3079-3107, 3159-3185, 3246-3271, 3282-3307, 3426-3474, 3561-3587, 3642-3707, 3804-3839, 3950-3977, 4004-4039, 4052-4114, 4139-4164, 4174-4199, 4241-4288, 4329-4365, 4421-4448, 4472-4536, 4680-4708, or 4784-4810 of the MLH3 gene.

[0372] E10. The oligonucleotide of any one of E1-E6, wherein the region of at least 10 nucleobases is complementary to an MLH3 gene corresponding to a sequence of reference mRNA NM_001040108.1 at one or more of positions 331-362, 393-438, 479-505, 534-574, 587-612, 681-740, 847-873, 991-1024, 1210-1262, 1351-1378, 1571-1597, 1623-1648, 1874-1902, 2066-2091, 2256-2281, 2388-2414, 2470-2515, 2732-2788, 2853-2878, 2901-2927, 3282-3307, 3562-3587, 4056-4083, 4241-4266, or 4506-4531 of the MLH3 gene.

[0373] E11. The oligonucleotide of any one of E1-E6, wherein the region of at least 10 nucleobases is complementary to an MLH3 gene corresponding to a sequence of reference mRNA NM_001040108.1 at one or more of positions 335-449, 587-612, 682-736, 848-873, 991-1016, 1179-1204, 1233-1260, 1351-1378, 1626-1651, 1874-1903, 2066-2091, 2115-2146, 2256-2287, 2389-2414, 2471-2499, 2762-2787, 2853-2878, 2911-2936, 3562-3587, 3814-3839, 4006-4031, 4056-4083, or 4244-4269 of the MLH3 gene.

[0374] E12. The oligonucleotide of any one of E1-E6, wherein the region of at least 10 nucleobases is complementary to an MLH3 gene corresponding to a sequence of reference mRNA NM_001040108.1 at one or more of positions 355-393, 952-984, 1177-1205, 2026-2052, 2066-2094, 2470-2498, 3159-3185, 3458-3485, or 4259-4292 of the MLH3 gene.

[0375] E13. The oligonucleotide of any one of E1-E6, wherein the oligonucleotide comprises the nucleobase sequence of any one of SEQ ID NOs: 6-4710.

[0376] E14. The oligonucleotide of any one of E1-E6, wherein the oligonucleotide comprises the nucleobase sequence of any one of SEQ ID NOs: 89, 92, 102, 107-108, 110-111, 115-116, 150, 154, 160-161, 163-164, 166, 168, 175-176, 178, 180, 182-183, 185-189, 201, 211-212, 229-231, 234-238, 241, 248-250, 254, 265-269, 282-283, 285-288, 294, 296, 319-322, 328-329, 366-368, 377-379, 381-399, 487-488, 511, 514-517, 520, 566-568, 573, 591, 593-594, 599, 602, 666, 669-670, 701-704, 728, 749-753, 755, 757, 784, 786-788, 790, 828-830, 959, 972, 974-977, 1002, 1004-1005, 1007, 1009-1013, 1086, 1110-1111, 1126, 1149, 1172, 1176-1181, 1185, 1260, 1271-1274, 1276-1277, 1297, 1302, 1387-1390, 1392-1393, 1396, 1461-1463, 1473-1474, 1482, 1490-1491, 1495, 1498-1502, 1505, 1508, 1510-1514, 1516-1518, 1525-1526, 1529-1530, 1546-1547, 1572, 1596-1597, 1721-1722, 1724-1727, 1744-1746, 1797, 1800-1802, 1824-1826, 1832, 1835-1836, 1859, 1865-1866, 1870-1873, 1875, 1878, 1880-1882, 1911, 1914-1918, 1924, 1945-1946, 1949, 2000-2001, 2035, 2064, 2066-2067, 2090-2091, 2163, 2166, 2169-2172, 2178, 2181, 2184, 2186, 2194, 2255-2256, 2307, 2321, 2333, 2343, 2345-2346, 2353-2355, 2394-2395, 2403-2404, 2460-2462, 2489-2492, 2495, 2499-2500, 2524-2530, 2561-2562, 2591, 2595, 2616, 2644-2651, 2653-2654, 2661-2664, 2674, 2683-2685, 2687, 2690-2691, 2693-2695, 2725-2728, 2777-2782, 2784-2785, 2789, 2791-2792, 2794-2795, 2797, 2848-2852, or 2917-2918.

[0377] E15. The oligonucleotide of any one of E1-E6, wherein the oligonucleotide comprises the nucleobase sequence of any one of SEQ ID NOs: 89, 92, 102, 107-108, 111, 116, 150, 154, 160-161, 163-164, 166, 168, 175-176, 178, 180, 182-183, 185-189, 201, 211-212, 229-231, 234-236, 238, 241, 248-250, 254, 265-269, 282-283, 285-288, 294, 296, 319-320, 322, 328-329, 366-368, 377, 379, 381-399, 487-488, 511, 514-517, 520, 566-568, 573, 591, 593-594, 599, 602, 666, 669-670, 701-704, 728, 750-753, 755, 757, 784, 786-788, 790, 828-830, 972, 974-977, 1002, 1004-1005, 1009-1013, 1110-1111, 1126, 1172, 1176-1181, 1271-1274, 1276-1277, 1297, 1302, 1387, 1390, 1392-1393, 1461-1463, 1474, 1482, 1490-1491, 1498-1502, 1505, 1508, 1510-1512, 1514, 1516-1518, 1525-1526, 1529-1530, 1546-1547, 1572, 1597, 1721-1722, 1724-1727, 1744-1746, 1797, 1800-1801, 1824-1826, 1832, 1835-1836, 1859, 1866, 1870-1873, 1878, 1880-1882, 1915-1917, 1924, 1945-1946, 1949, 2000-2001, 2035, 2064, 2066-2067, 2090, 2163, 2166, 2169-2172, 2178, 2181, 2184, 2186, 2194, 2255-2256, 2307, 2321, 2333, 2343, 2345, 2353, 2394-2395, 2403-2404, 2460-2462, 2489, 2491-2492, 2495, 2499, 2524-2525, 2527-2530, 2561-2562, 2591, 2595, 2616, 2644-2651, 2653-2654, 2661-2664, 2674, 2684, 2693-2695, 2725-2728, 2777-2782, 2784-2785, 2789, 2791-2792, 2794-2795, 2797, 2849-2852, or 2917-2918.

[0378] E16. The oligonucleotide of any one of E1-E6, wherein the oligonucleotide comprises the nucleobase sequence of any one of SEQ ID NOs: 89, 102, 111, 116, 150, 154, 160-161, 163-164, 166, 168, 175-176, 178, 180, 183, 185-189, 201, 211-212, 229-231, 235-236, 238, 241, 250, 254, 265-269, 282-283, 286-288, 294, 296, 319, 322, 328, 366-368, 377, 379, 381-399, 511, 514-517, 567-568, 591, 593-594, 599, 602, 666, 669-670, 703, 728, 750-753, 755, 757, 784, 786-788, 828-830, 972, 974-977, 1002, 1004-1005, 1009, 1011-1012, 1110-1111, 1126, 1172, 1176-1181, 1272-1274, 1297, 1302, 1387, 1392-1393, 1461-1463, 1474, 1482, 1498-1500, 1502, 1505, 1508, 1510-1511, 1514, 1516-1518, 1525-1526, 1529-1530, 1546-1547, 1572, 1597, 1721-1722, 1725-1727, 1745-1746, 1800-1801, 1824, 1832, 1835-1836, 1859, 1866, 1870-1872, 1878, 1880-1882, 1916, 1924, 1946, 1949, 2000-2001, 2066, 2090, 2163, 2169-2171, 2178, 2181, 2186, 2255-2256, 2307, 2321, 2333, 2394, 2403-2404, 2460-2462, 2489, 2491-2492, 2495, 2499, 2524-2525, 2527-2530, 2561, 2591, 2616, 2644, 2646, 2649-2651, 2653-2654, 2661-2664, 2684, 2693-2695, 2726-2728, 2777-2780, 2782, 2784-2785, 2791-2792, 2794-2795, 2797, 2849-2850, 2852, or 2917-2918.

[0379] E17. The oligonucleotide of any one of E1-E6, the oligonucleotide comprises the nucleobase sequence of any one of SEQ ID NOs: 160-161, 163-164, 166, 211-212, 230-231, 267-268, 282, 294, 322, 366-367, 391-394, 399, 514-515, 594, 602, 728, 750, 752-753, 755, 828, 830, 975-976, 1002, 1176-1179, 1274, 1387, 1462-1463, 1510, 1514, 1529-1530, 1726-1727, 1745-1746, 1824, 1871-1872, 2090, 2256, 2528-2530, 2644, or 2792.

[0380] E18. The oligonucleotide of any one of E1-E6, the oligonucleotide comprises the nucleobase sequence of any one of SEQ ID NOs: 164, 186-187, 212, 235, 322, 367-368, 379, 384-385, 388-389, 391-392, 395, 515, 594, 703, 751-753, 828-830, 1005, 1176-1180, 1274, 1297, 1302, 1387, 1393, 1463, 1511, 1514, 1745, 1824, 1881, 2256, 2404, 2491, 2528, 2530, or 2646.

[0381] E19. The oligonucleotide of any one of E1-E6, the oligonucleotide comprises the nucleobase sequence of any one of SEQ ID NOs: 174-176, 178, 180-187, 566-569, 573, 701-704, 1260-1261, 1274-1277, 1510-1513, 2000-2001, 2194, 2196, 2661-2664, or 2666.

[0382] E20. The oligonucleotide of any one of E1-E6, wherein the nucleobase sequence of the oligonucleotide consists of any one of SEQ ID NOs: 6-4710.

[0383] E21. The oligonucleotide of any one of E1-E6, wherein the oligonucleotide consists of the nucleobase sequence of any one of SEQ ID NOs: 89, 92, 102, 107-108, 110-111, 115-116, 150, 154, 160-161, 163-164, 166, 168, 175-176, 178, 180, 182-183, 185-189, 201, 211-212, 229-231, 234-238, 241, 248-250, 254, 265-269, 282-283, 285-288, 294, 296, 319-322, 328-329, 366-367-368, 377-379, 381-399, 487-488, 511, 514-517, 520, 566-568, 573, 591, 593-594, 599, 602, 666, 669-670, 701-704, 728, 749-753, 755, 757, 784, 786-788, 790, 828-830, 959, 972, 974-977, 1002, 1004-1005, 1007, 1009-1013, 1086, 1110-1111, 1126, 1149, 1172, 1176-1181, 1185, 1260, 1271-1274, 1276-1277, 1297, 1302, 1387-1390, 1392-1393, 1396, 1461-1463, 1473-1474, 1482, 1490-1491, 1495, 1498-1502, 1505, 1508, 1510-1514, 1516-1518, 1525-1526, 1529-1530, 1546-1547, 1572, 1596-1597, 1721-1722, 1724-1725-1726-1727, 1744-1746, 1797, 1800-1802, 1824-1826, 1832, 1835-1836, 1859, 1865-1866, 1870-1873, 1875, 1878, 1880-1882, 1911, 1914-1918, 1924, 1945-1946, 1949, 2000-2001, 2035, 2064, 2066-2067, 2090-2091, 2163, 2166, 2169-2172, 2178, 2181, 2184, 2186, 2194, 2255-2256, 2307, 2321, 2333, 2343, 2345-2346, 2353-2355, 2394-2395, 2403-2404, 2460-2462, 2489-2492, 2495, 2499-2500, 2524-2530, 2561-2562, 2591, 2595, 2616, 2644-2651, 2653-2654, 2661-2664, 2674, 2683-2685, 2687, 2690-2691, 2693-2695, 2725-2728, 2777-2782, 2784-2785, 2789, 2791-2792, 2794-2795, 2797, 2848-2852, or 2917-2918.

[0384] E22. The oligonucleotide of any one of E1-E6, wherein the oligonucleotide consists of the nucleobase sequence of any one of SEQ ID NOs: 89, 92, 102, 107-108, 111, 116, 150, 154, 160-161, 163-164, 166, 168, 175-176, 178, 180, 182-183, 185-189, 201, 211-212, 229-231, 234-236, 238, 241, 248-250, 254, 265-269, 282-283, 285-288, 294, 296, 319-320, 322, 328-329, 366-368, 377, 379, 381-399, 487-488, 511, 514-517, 520, 566-568, 573, 591, 593-594, 599, 602, 666, 669-670, 701-704, 728, 750-753, 755, 757, 784, 786-788, 790, 828-830, 972, 974-977, 1002, 1004-1005, 1009-1013, 1110-1111, 1126, 1172, 1176-1181, 1271-1274, 1276-1277, 1297, 1302, 1387, 1390, 1392-1393, 1461-1462-1463, 1474, 1482, 1490-1491, 1498-1502, 1505, 1508, 1510-1512, 1514, 1516-1518, 1525-1526, 1529-1530, 1546-1547, 1572, 1597, 1721-1722, 1724-1727, 1744-1746, 1797, 1800-1801, 1824-1826, 1832, 1835-1836, 1859, 1866, 1870-1873, 1878, 1880-1882, 1915-1917, 1924, 1945-1946, 1949, 2000-2001, 2035, 2064, 2066-2067, 2090, 2163, 2166, 2169-2172, 2178, 2181, 2184, 2186, 2194, 2255-2256, 2307, 2321, 2333, 2343, 2345, 2353, 2394-2395, 2403-2404, 2460-2462, 2489, 2491-2492, 2495, 2499, 2524-2525, 2527-2530, 2561-2562, 2591, 2595, 2616, 2644-2651, 2653-2654, 2661-2664, 2674, 2684, 2693-2695, 2725-2728, 2777-2782, 2784-2785, 2789, 2791-2792, 2794-2795, 2797, 2849-2852, or 2917-2918.

[0385] E23. The oligonucleotide of any one of E1-E6, wherein the oligonucleotide consists of the nucleobase sequence of any one of SEQ ID NOs: 89, 102, 111, 116, 150, 154, 160-161, 163-164, 166, 168, 175-176, 178, 180, 183, 185-189, 201, 211-212, 229-231, 235-236, 238, 241, 250, 254, 265-269, 282-283, 286-288, 294, 296, 319, 322, 328, 366-368, 377, 379, 381-399, 511, 514-517, 567-568, 591, 593-594, 599, 602, 666, 669-670, 703, 728, 750-753, 755, 757, 784, 786-788, 828-830, 972, 974-977, 1002, 1004-1005, 1009, 1011-1012, 1110-1111, 1126, 1172, 1176-1181, 1272-1274, 1297, 1302, 1387, 1392-1393, 1461-1463, 1474, 1482, 1498-1500, 1502, 1505, 1508, 1510-1511, 1514, 1516-1518, 1525-1526, 1529-1530, 1546-1547, 1572, 1597, 1721-1722, 1725-1727, 1745-1746, 1800-1801, 1824, 1832, 1835-1836, 1859, 1866, 1870-1872, 1878, 1880-1882, 1916, 1924, 1946, 1949, 2000-2001, 2066, 2090, 2163, 2169-2171, 2178, 2181, 2186, 2255-2256, 2307, 2321, 2333, 2394, 2403-2404, 2460-2462, 2489, 2491-2492, 2495, 2499, 2524-2525, 2527-2530, 2561, 2591, 2616, 2644, 2646, 2649-2651, 2653-2654, 2661-2664, 2684, 2693-2695, 2726-2728, 2777-2780, 2782, 2784-2785, 2791-2792, 2794-2795, 2797, 2849-2850, 2852, or 2917-2918.

[0386] E24. The oligonucleotide of any one of E1-E6, wherein the oligonucleotide consists of the nucleobase sequence of any one of SEQ ID NOs: 160-161, 163-164, 166, 211-212, 230-231, 267-268, 282, 294, 322, 366-367, 391-394, 399, 514-515, 594, 602, 728, 750, 752-753, 755, 828, 830, 975-976, 1002, 1176-1179, 1274, 1387, 1462-1463, 1510, 1514, 1529-1530, 1726-1727, 1745-1746, 1824, 1871-1872, 2090, 2256, 2528-2530, 2644, or 2792.

[0387] E25. The oligonucleotide of any one of E1-E6, wherein the oligonucleotide consists of the nucleobase sequence of any one of SEQ ID NOs: 164, 186-187, 212, 235, 322, 367-368, 379, 384-385, 388-389, 391-392, 395, 515, 594, 703, 751-753, 828-830, 1005, 1176-1180, 1274, 1297, 1302, 1387, 1393, 1463, 1511, 1514, 1745, 1824, 1881, 2256, 2404, 2491, 2528, 2530, or 2646.

[0388] E26. The oligonucleotide of any one of E1-E6, wherein the oligonucleotide consists of the nucleobase sequence of any one of SEQ ID NOs: 174-176, 178, 180-187, 566-569, 573, 701-704, 1260-1261, 1274-1277, 1510-1513, 2000-2001, 2194, 2196, 2661-2664, or 2666.

[0389] E27. The oligonucleotide of any one of E1-E26, wherein the oligonucleotide exhibits at least 50% mRNA inhibition at a 20 nM oligonucleotide concentration when determined using a cell assay when compared with a control cell.

[0390] E28. The oligonucleotide of any one of E1-E26, wherein the oligonucleotide exhibits at least 60% mRNA inhibition at a 20 nM oligonucleotide concentration when determined using a cell assay when compared with a control cell.

[0391] E29. The oligonucleotide of any one of E1-E26, wherein the oligonucleotide exhibits at least 70% mRNA inhibition at a 20 nM oligonucleotide concentration when determined using a cell assay when compared with a control cell.

[0392] E30. The oligonucleotide of any one of E1-E26, wherein the oligonucleotide exhibits at least 85% mRNA inhibition at a 20 nM oligonucleotide concentration when determined using a cell assay when compared with a control cell.

[0393] E31. The oligonucleotide of any one of E1-E26, wherein the oligonucleotide exhibits at least 50% mRNA inhibition at a 2 nM oligonucleotide concentration when determined using a cell assay when compared with a control cell.

[0394] E32. The oligonucleotide of any one of E1-E26, wherein the oligonucleotide exhibits at least 60% mRNA inhibition at a 2 nM oligonucleotide concentration when determined using a cell assay when compared with a control cell.

[0395] E33. The oligonucleotide of any one of E1-E26, wherein the oligonucleotide exhibits at least 70% mRNA inhibition at a 2 nM oligonucleotide concentration when determined using a cell assay when compared with a control cell.

[0396] E34. The oligonucleotide of any one of E1-E26, wherein the oligonucleotide exhibits at least 85% mRNA inhibition at a 2 nM oligonucleotide concentration when determined using a cell assay when compared with a control cell.

[0397] E35. The oligonucleotide of any one of E1-E34, wherein the oligonucleotide comprises at least one alternative internucleoside linkage.

[0398] E36. The oligonucleotide of E35, wherein the at least one alternative internucleoside linkage is a phosphorothioate internucleoside linkage.

[0399] E37. The oligonucleotide of E35, wherein the at least one alternative internucleoside linkage is a 2′-alkoxy internucleoside linkage.

[0400] E38. The oligonucleotide of E35, wherein the at least one alternative internucleoside linkage is an alkyl phosphate internucleoside linkage.

[0401] E39. The oligonucleotide of any one of E1-E38, wherein the oligonucleotide comprises at least one alternative nucleobase.

[0402] E40. The oligonucleotide of E39, wherein the alternative nucleobase is 5′-methylcytosine, pseudouridine, or 5-methoxyuridine.

[0403] E41. The oligonucleotide of any one of E1-E40, wherein the oligonucleotide comprises at least one alternative sugar moiety.

[0404] E42. The oligonucleotide of E41, wherein the alternative sugar moiety is 2′-OMe or a bicyclic nucleic acid.

[0405] E43. The oligonucleotide of any one of E1-E42, wherein the oligonucleotide further comprises a ligand conjugated to the 5′ end or the 3′ end of the oligonucleotide through a monovalent or branched bivalent or trivalent linker.

[0406] E44. The oligonucleotide of any one of E1-E43, wherein oligonucleotide comprises a region complementary to at least 17 contiguous nucleotides of a MLH3 gene.

[0407] E45. The oligonucleotide of any one of E1-E43, wherein oligonucleotide comprises a region complementary to at least 19 contiguous nucleotides of a MLH3 gene.

[0408] E46. The oligonucleotide of any one of E1-E43, wherein the oligonucleotide comprises a region complementary to 19 to 23 contiguous nucleotides of a MLH3 gene.

[0409] E47. The oligonucleotide of any one of E1-E43, wherein the oligonucleotide comprises a region complementary to 19 contiguous nucleotides of a MLH3 gene.

[0410] E48. The oligonucleotide of any one of E1-E43, wherein the oligonucleotide comprises a region complementary to 20 contiguous nucleotides of a MLH3 gene.

[0411] E49. The oligonucleotide of any one of E1-E43, wherein the oligonucleotide is from about 15 to 25 nucleosides in length.

[0412] E50. The oligonucleotide of any one of E1-E43, wherein the oligonucleotide is 20 nucleosides in length.

[0413] E51. A pharmaceutical composition comprising one or more of the oligonucleotides of any one of E1-E50 and a pharmaceutically acceptable carrier or excipient.

[0414] E52. A composition comprising one or more of the oligonucleotide of any one of E1-E50 and a lipid nanoparticle, a polyplex nanoparticle, a lipoplex nanoparticle, or a liposome.

[0415] E53. A method of inhibiting transcription of MLH3 in a cell, the method comprising contacting the cell with one or more of the oligonucleotides of any one of E1-E50, the pharmaceutical composition of E51, or the composition of E52 for a time sufficient to obtain degradation of an mRNA transcript of a MLH3 gene, inhibits expression of the MLH3 gene in the cell.

[0416] E54. A method of treating, preventing, or delaying the progression a trinucleotide repeat expansion disorder in a subject in need thereof, the method comprising administering to the subject one or more of the oligonucleotides of any one of E1-E50, the pharmaceutical composition of E51, or the composition of E52.

[0417] E55. A method of reducing the level and/or activity of MLH3 in a cell of a subject identified as having a trinucleotide repeat expansion disorder, the method comprising contacting the cell with one or more of the oligonucleotides of any one of E1-E50, the pharmaceutical composition of E51, or the composition of E52.

[0418] E56. A method for inhibiting expression of an MLH3 gene in a cell comprising contacting the cell with one or more of the oligonucleotides of any one of E1-E50, the pharmaceutical composition of E51, or the composition of E52 and maintaining the cell for a time sufficient to obtain degradation of a mRNA transcript of an MLH3 gene, thereby inhibiting expression of the MLH3 gene in the cell.

[0419] E57. A method of decreasing trinucleotide repeat expansion in a cell, the method comprising contacting the cell with one or more of the oligonucleotides of any one of E1-E50, the pharmaceutical composition of E51, or the composition of E52.

[0420] E58. The method of E56 or E57, wherein the cell is in a subject.

[0421] E59. The method of any one of E54, E55, and E58, wherein the subject is a human.

[0422] E60. The method of any one of E54-E58, wherein the cell is a cell of the central nervous system or a muscle cell.

[0423] E61. The method of any one of E54, E55, and E58-A60, wherein the subject is identified as having a trinucleotide repeat expansion disorder.

[0424] E62. The method of any one of E54, E55, and E57-E61, wherein the trinucleotide repeat expansion disorder is a polyglutamine disease.

[0425] E63. The method of E62, wherein the polyglutamine disease is selected from the group consisting of dentatorubropallidoluysian atrophy, Huntington's disease, spinal and bulbar muscular atrophy, spinocerebellar ataxia type 1, spinocerebellar ataxia type 2, spinocerebellar ataxia type 3, spinocerebellar ataxia type 6, spinocerebellar ataxia type 7, spinocerebellar ataxia type 17, and Huntington's disease-like 2.

[0426] E64. The method of any one of E54-E61, wherein the trinucleotide repeat expansion disorder is a non-polyglutamine disease.

[0427] E65. The method of E64, wherein the non-polyglutamine disease is selected from the group consisting of fragile X syndrome, fragile X-associated tremor/ataxia syndrome, fragile XE mental retardation, Friedreich's ataxia, myotonic dystrophy type 1, spinocerebellar ataxia type 8, spinocerebellar ataxia type 12, oculopharyngeal muscular dystrophy, Fragile X-associated premature ovarian failure, FRA2A syndrome, FRA7A syndrome, and early infantile epileptic encephalopathy.

[0428] E66. One or more oligonucleotides of any one of E1-E50, the pharmaceutical composition of E51, or the composition of E52 for use in the prevention or treatment of a trinucleotide repeat expansion disorder.

[0429] E67. The oligonucleotide, pharmaceutical composition, or composition of E65, wherein the trinucleotide repeat expansion disorder is selected from the group consisting of dentatorubropallidoluysian atrophy, Huntington's disease, spinal and bulbar muscular atrophy, spinocerebellar ataxia type 1, spinocerebellar ataxia type 2, spinocerebellar ataxia type 3, spinocerebellar ataxia type 6, spinocerebellar ataxia type 7, spinocerebellar ataxia type 17, Huntington's disease-like 2, fragile X syndrome, fragile X-associated tremor/ataxia syndrome, fragile XE mental retardation, Friedreich's ataxia, myotonic dystrophy type 1, spinocerebellar ataxia type 8, spinocerebellar ataxia type 12, oculopharyngeal muscular dystrophy, Fragile X-associated premature ovarian failure, FRA2A syndrome, FRA7A syndrome, and early infantile epileptic encephalopathy.

[0430] E68. The oligonucleotide, pharmaceutical composition, or composition of E66 or E67, wherein the trinucleotide repeat expansion disorder is Huntington's disease.

[0431] E69. The oligonucleotide, pharmaceutical composition, or composition of E66 or E67, wherein the trinucleotide repeat expansion disorder is Friedreich's ataxia.

[0432] E70. The oligonucleotide, pharmaceutical composition, or composition of E66 or E67, wherein the trinucleotide repeat expansion disorder is myotonic dystrophy type 1.

[0433] E71. The oligonucleotide, pharmaceutical composition, or composition of any of E66-E70, wherein the oligonucleotide, pharmaceutical composition, or composition is administered intrathecally.

[0434] E72. The oligonucleotide, pharmaceutical composition, or composition of any of E66-E70, wherein the oligonucleotide, pharmaceutical composition, or composition is administered intraventricularly.

[0435] E73. The oligonucleotide, pharmaceutical composition, or composition of any of E66-E70, wherein the oligonucleotide, pharmaceutical composition, or composition is administered intramuscularly.

[0436] E74. A method of treating, preventing, or delaying the progression a disorder in a subject in need thereof wherein the subject is suffering from trinucleotide repeat expansion disorder, comprising administering to said subject one or more of the oligonucleotides of any one of E1-E50, the pharmaceutical composition of E51, or the composition of E52.

[0437] E75. The method of E74, further comprising administering an additional therapeutic agent.

[0438] E76. The method of E75, wherein the additional therapeutic agent is another oligonucleotide that hybridizes to an mRNA encoding the Huntingtin gene.

[0439] E77. A method of preventing or delaying progression of a trinucleotide repeat expansion disorder in a subject, the method comprising administering to the subject one or more of the oligonucleotides of any one of E1-E50, the pharmaceutical composition of E51, or the composition of E52 in an amount effective to delay progression of a trinucleotide repeat expansion disorder of the subject.

[0440] E78. The method of E77, wherein the trinucleotide repeat expansion disorder is selected from the group consisting of dentatorubropallidoluysian atrophy, Huntington's disease, spinal and bulbar muscular atrophy, spinocerebellar ataxia type 1, spinocerebellar ataxia type 2, spinocerebellar ataxia type 3, spinocerebellar ataxia type 6, spinocerebellar ataxia type 7, spinocerebellar ataxia type 17, Huntington's disease-like 2, fragile X syndrome, fragile X-associated tremor/ataxia syndrome, fragile XE mental retardation, Friedreich's ataxia, myotonic dystrophy type 1, spinocerebellar ataxia type 8, spinocerebellar ataxia type 12, oculopharyngeal muscular dystrophy, Fragile X-associated premature ovarian failure, FRA2A syndrome, FRA7A syndrome, and early infantile epileptic encephalopathy.

[0441] E79. The method of E77 or E78, wherein the trinucleotide repeat expansion disorder is Huntington's disease.

[0442] E80. The method of E77 or E78, wherein the trinucleotide repeat expansion disorder is Friedrich's ataxia.

[0443] E81. The method of E77 or E78, wherein the trinucleotide repeat expansion disorder is myotonic Dystrophy type 1.

[0444] E82. The method of any of E77 or E78, further comprising administering an additional therapeutic agent.

[0445] E83. The method of E82, wherein the additional therapeutic agent is an oligonucleotide that hybridizes to an mRNA encoding the Huntingtin gene.

[0446] E84. The method of any of E77-E83, wherein progression of the trinucleotide repeat expansion disorder is delayed by at least 120 days, for example, at least 6 months, at least 12 months, at least 2 years, at least 3 years, at least 4 years, at least 5 years, at least 10 years or more, when compared with a predicted progression.

[0447] E85. One or more oligonucleotides of any one of E1-E50, the pharmaceutical composition of E51, or the composition of E52, for use in preventing or delaying the progression of a trinucleotide repeat expansion disorder in a subject.

[0448] E86. The oligonucleotide, pharmaceutical composition, or composition for the use of E85, wherein the trinucleotide repeat expansion disorder is selected from the group consisting of dentatorubropallidoluysian atrophy, Huntington's disease, spinal and bulbar muscular atrophy, spinocerebellar ataxia type 1, spinocerebellar ataxia type 2, spinocerebellar ataxia type 3, spinocerebellar ataxia type 6, spinocerebellar ataxia type 7, spinocerebellar ataxia type 17, Huntington's disease-like 2, fragile X syndrome, fragile X-associated tremor/ataxia syndrome, fragile XE mental retardation, Friedreich's ataxia, myotonic dystrophy type 1, spinocerebellar ataxia type 8, spinocerebellar ataxia type 12, oculopharyngeal muscular dystrophy, Fragile X-associated premature ovarian failure, FRA2A syndrome, FRA7A syndrome, and early infantile epileptic encephalopathy.

[0449] E87. The oligonucleotide, pharmaceutical composition, or composition of E85 or E86, wherein the trinucleotide repeat expansion disorder is Huntington's disease.

[0450] E88. The oligonucleotide, pharmaceutical composition, or composition of E85 or E86, wherein the trinucleotide repeat expansion disorder is Friedrich's ataxia.

[0451] E89. The oligonucleotide, pharmaceutical composition, or composition of E85 or E85, wherein the trinucleotide repeat expansion disorder is myotonic Dystrophy type 1.

[0452] E90. The oligonucleotide, pharmaceutical composition, or composition for the use of any one of E85-E89, wherein progression of the trinucleotide repeat expansion disorder is delayed by at least 120 days, for example, at least 6 months, at least 12 months, at least 2 years, at least 3 years, at least 4 years, at least 5 years, at least 10 years or more, when compared with a predicted progression.

The application's sequence listing, which the Patent Office published only in electronic form, follows.

SEQUENCE LISTING (4710 sequences)

SEQ ID NO: 1 - DNA, 7911 bp, Homo sapiens
aacaactggtgcgcatgcgcactggtgtctcgcggcctggcgcgccccctccgaagcgcatgctcgtgggcacgcacgagcctcaagatccaaggtgcgcgcgtcggcgtccgaggcggttggtgtcggagaatttgttaagcgggactccaggcaattatttccagtcagagaaggaaaccagtgcctggcattctcaccatctttctacctaccatgatcaagtgcttgtcagttgaagtacaagccaaattgcgttctggtttggccataagctccttgggccaatgtgttgaggaacttgccctcaacagtattgatgctgaagcaaaatgtgtggctgtcagggtgaatatggaaaccttccaagttcaagtgatagacaatggatttgggatggggagtgatgatgtagagaaagtgggaaatcgttatttcaccagtaaatgccactcggtacaggacttggagaatccaaggttttatggtttccgaggagaggccttggcaaatattgctgacatggccagtgctgtggaaatttcgtccaagaaaaacaggacaatgaaaacttttgtgaaactgtttcagagtggaaaagccctgaaagcttgtgaagctgatgtgactagagcaagcgctgggactactgtaacagtgtataacctattttaccagcttcctgtaaggaggaaatgcatggaccctagactggagtttgagaaggttaggcagagaatagaagctctctcactcatgcacccttccatttctttctctttgagaaatgatgtttctggttccatggttcttcagctccctaaaaccaaagacgtatgttcccgattttgtcaaatttatggattgggaaagtcccaaaagctaagagaaataagttttaaatataaagagtttgagcttagtggctatatcagctctgaagcacattacaacaagaatatgcagtttttgtttgtgaacaaaagactagttttaaggacaaagctacataaactcattgactttttattaaggaaagaaagtattatatgcaagccaaagaatggtcccaccagtaggcaaatgaattcaagtcttcggcaccggtctaccccagaactctatggcatatatgtaattaatgtgcagtgccaattctgtgagtatgatgtgtgcatggagccagccaaaactctgattgaatttcagaactgggacactctcttgttttgcattcaggaaggagtgaaaatgtttttaaagcaagaaaaattatttgtggaattatcaggtgaggatattaaggaatttagtgaagataatggttttagtttatttgatgctactcttcagaagcgtgtgacttccgatgagaggagcaatttccaggaagcatgtaataatattttagattcctatgagatgtttaatttgcagtcaaaagctgtgaaaagaaaaactactgcagaaaacgtaaacacacagagttctagggattcagaagctaccagaaaaaatacaaatgatgcatttttgtacatttatgaatcaggtggtccaggccatagcaaaatgacagagccatctttacaaaacaaagacagctcttgctcagaatcaaagatgttagaacaagagacaattgtagcatcagaagctggagaaaatgagaaacataaaaaatctttcctggaacatagctctttagaaaatccgtgtggaaccagtttagaaatgtttttaagcccttttcagacaccatgtcactttgaggagagtgggcaggatctagaaatatggaaagaaagtactactgttaatggcatggctgccaacatcttgaaaaataatagaattcagaatcaaccaaagagatttaaagatgctactgaagtgggatgccagcctctgccttttgcaacaacattatggggagtacatagtgctcagacagagaaagagaaaaaaaaagaatctagcaattgtggaagaagaaatgtttttagttatgggcgagttaaattatgttccactggctttataactcatgtagtacaaaatgaaaaaactaaatcaactgaaacagaacattcatttaaaaattatgttagacctggtcccacacgtgcccaagaaacatttggaaatagaacacgtcattcagttgaaactccagacatcaaagatttagccagcactttaagtaaagaatctggtcaattgcccaacaaaaaaaattgcagaacgaatataagttatgggctagagaatgaacctacagcaacttatacaatgttttctgcttttcaggaaggtagcaaaaaatcacaaacagattgcatattatctgatacatccccctctttcccctggtatagacacgtttccaatgatagtaggaaaacagataaattaattggtttctccaaaccaatcgtccgtaagaagctaagcttgagttcacagctaggatctttagagaagtttaagaggcaatatgggaaggttgaaaatcctctggatacagaagtagaggaaagtaatggagtcactaccaatctcagtcttcaagttgaacctgacattctgctgaaggacaagaaccgcttagagaactctgatgtttgtaaaatcactactatggagcatagtgattcagatagtagttgtcaaccagcaagccacatccttaactcagagaagtttccattctccaaggatgaagattgtttagaacaacagatgcctagtttgagagaaagtcctatgaccctgaaggagttatctctctttaatagaaaacctttggaccttgagaagtcatctgaatcactagcctctaaattatccagactgaagggttccgaaagagaaactcaaacaatggggatgatgagtcgttttaatgaacttccaaattcagattccagtaggaaagacagcaagttgtgcagtgtgttaacacaagatttttgtatgttatttaacaacaagcatgaaaaaacagagaatggtgtcatcccaacatcagattctgccacacaggataattcctttaataaaaatagtaaaacacattctaacagcaatacaacagagaactgtgtgatatcagaaactcctttggtattgccctataataattctaaagttaccggtaaagattcagatgttcttatcagagcctcagaacaacagataggaagtcttgactctcccagtggaatgttaatgaatccggtagaagatgccacaggtgaccaaaatggaatttgttttcagagtgaggaatctaaagcaagagcttgttctgaaactgaagagtcaaacacgtgttgttcagattggcagcggcatttcgatgtagccctgggaagaatggtttatgtcaacaaaatgactggactcagcacattcattgccccaactgaggacattcaggctgcttgtactaaagacctgacaactgtggctgtggatgttgtacttgagaatgggtctcagtacaggtgtcaaccttttagaagcgaccttgttcttcctttccttccgagagctcgagcagagaggactgtgatgagacaggataacagagatactgtggatgatactgttagtagcgaatcgcttcagtctttgttctcagaatgggacaatccagtatttgcccgttatccagaggttgctgttgatgtaagcagtggccaggctgagagcttagcagttaaaattcacaacatcttgtatccctatcgtttcaccaaaggaatgattcattcaatgcaggttctccagcaagtagataacaagtttattgcctgtttgatgagcactaagactgaagagaatggcgaggcaggtgggaacctgctcgtgctggtggatcagcacgctgcccatgagcgtatacgtctggagcagcttatcattgattcctacgagaagcaacaggcacaaggctctggtcggaaaaaattactgtcttctactctaattcctccgctagagataacagtgacagaggaacaaaggagactcttatggtgttaccacaaaaatctggaagatctgggccttgaatttgtatttccagacactagtgattctctggtccttgtgggaaaagtaccactatgttttgtggaaagagaagccaatgaacttcggagaggaagatctactgtgaccaagagtattgtggaggaatttatccgagaacaactggagctactccagaccaccggaggcatccaagggacattgccactgactgtccagaaggtgttggcatcccaagcctgccatggggccattaagtttaatgatggcctgagcttacaggaaagttgccgccttattgaagctctgtcctcatgccagctgccattccagtgtgctcacgggagaccttctatgctgccgttagctgacatagaccacttggaacaggaaaaacagattaaacccaacctcactaaacttcgcaaaatggcccaggcctggcgtctctttggaaaagcagagtgtgatacaaggcagagcctgcagcaatccatgcctccctgtgagccaccatgagaacagaatcactggtctaaaaggaacaaagggatgttcactgtatgcctctgagcagagagcagcagcagcaggtaccagcacggccctgactgaatcagcccagtgtccctgagcagcttagacagcagggctctctgtatcagtctttcttgagcagatgattcccctagttgagtagccagatgaaattcaagcctaaagacaattcattcatttgcatccatgggcacagaaggttgctatatagtatctaccttttgctacttatttaatgataaaatttaatgacagtttgattggttgcttggtttgttatttgaagggtgtgatttttgtttttgtacagttttttttcaagcttcacatttgcgtgtatctaattcagctgatgctcaagtccaaggggtagtctgccttcccaggctgcccccagggtttctgcactggtcccctcttttcccttcagtcttcttcacttccctatgctgctgcttcatgtgctacatctcagacttaaagagtttctctactacagtgaaaacattctctagggtctttcatcaggcctttagttattttagggataaaaactattgataaaaaggacaaggatagaacagagaaaatttaaagtcctgttccgggttttttgttatgttttctttaaaaactcagagactgatgttcaatatcccaaaccagtaaaatggtgaaaatactatgagcttgttttttaaaatatgattttttttggtactttataaagtatctctttatgtgaaagcaattgtcatatcaaaacacagcatacatacgttcaacctaaccaaatatctttacactttttctttcaggagacaagggttctttgggtccctttcaaacggtatcttggtgttattacattatgcctatctattgcccttataatatcacttgggaccaggactgatcgttctgcaaatgcttgttatgccattctcaatctatttttcccgcaccttttcacatgatttgtggttaataggactcaacagactaaaattgcatagtagaaaaaaaatgcaaaaagccagctggtaatgtttattgcaactggggtgctatacaattagtaagatgatgcaatgagaatttctacttttgtatttcctgaccagcctgctcaaagtggcttttatatcaattgaatgattttcctcattttttaatacaggaaaccaattcgtgctcatggaagaaaagttcctttgccagcagccttgaagtgaatcttacaggagcaatgaaagtattgcattcattagcgtctgccccagagaaggttcagagaaaaccttcacttgttttcaaggggatccttgtagatttacgtaattggaatcctgaagaacaggccctactgtctaaaaaatggcttttattcttctaaatacatataaacggatgttttatagatgggaagacatgaccttagaaaggagagagttttcagaggatttgccaggctgtcaggggctctgcctccaggcccagtgtggcagtgtggcctcagggcctccgcctccctgcttgagggctgcatggaggccaactgtcctgggagttgtaaaaatcttttaaggccagaccaatttgagggattttaaaaagtgtctcagtgcctcttatgatttcagaaggttttgctatatgtaatcccaactactgttttcttgagagtagcagaggattagaaaaagtcctccataaattatgtaaccggccttcctgactagcctgactcaagcaatgtaagagataattattctgttttcataatttataagtgtgggggcatgcctcagcataaaaacaacctattagggaaaaatatctaatagattacctttatcgcctgttagggttttatgttgtttttaactcagatgccataagaacaaagatacatgtaatttataatagtaatcattaatacctatattgtgctttaaggtttacaaaataatttttctcatactttatcttagtttagtttcttgacagtccatgaggtaaggtggtagctttatcaccattttacaaagtgggaaacgaaggttcctcttaggaacctagttgtcacctttgtataataaaacttcgaagctcggagctgttaactggtttgctgaaggcttagctgtaagagccagaattcagacccaggtctgagtgacttcaaactgcacagtccttcccattattacccatatgctatcccttatatttttaatttattaggaattcattcatttataaacttggtgattcacctttattagattctggtcgctgaaggctttagtaacttcagagtaaaacttgagagatgagatgtaaaatgcagccattcttgagagttcctttttctgtaacattcatcaacacttcattgagaagtgaaggttcctatggctgtctctaccttcaagaggcttagctttagtcactgagaaagacaaggaaactaatgatagaatatagtagcttcttctggcgttaggtatcacagagtcacagctagttacagctagccctttattattgaaagaagaggagctagcagtcccactatcagaattaagactagagatggtaataggagctagtatcagaaaagcttaaggcaaagcataaagtgtaggctagaatgaagctggagaatggggagggggcttgggtaacatccagaacctggctggggacctggaactacatgagatgtaagaatggagaggttctagcagtcagaggtcaggtacaaatgaacagctgggatctgcgcatggcagacagtgaaaaaacccaggcaagcaaaatggtcagagcagaaaggggcccaaggccacgttcttgagatgtggagggggctgaggaagccacgccaagtaaggacagatgcagctcagcagttcctagcgagccctgacaagccagctcagctgaagcttcgggtgggagccagtcatggcacagtggagtgaaggaagagcagtttcaggcacccaaaacctgacccccacgacctgttttccacctgaagagccacccattccatccaaacccttggcaaaagtctgctaacagagagaaccggccagtatgctggccagtcgcgatcatgcctgtctttaccctctaagctgaagctgctcatcaacggtgagatggcaaaaaggtgggtccagaagaggggaaaagaagggagtctgtgaaaacaaaatgctgaagaatctgcatcaaataaacccttccttccttcctttttccttcaaaaaaaaaaaaaaa

SEQ ID NO: 2 - protein, 1453 aa, Homo sapiens
MIKCLSVEVQAKLRSGLAISSLGQCVEELALNSIDAEAKCVAVRVNMETFQVQVIDNGFGMGSDDVEKVGNRYFTSKCHSVQDLENPRFYGFRGEALANIADMASAVEISSKKNRTMKTFVKLFQSGKALKACEADVTRASAGTTVTVYNLFYQLPVRRKCMDPRLEFEKVRQRIEALSLMHPSISFSLRNDVSGSMVLQLPKTKDVCSRFCQIYGLGKSQKLREISFKYKEFELSGYISSEAHYNKNMQFLFVNKRLVLRTKLHKLIDFLLRKESIICKPKNGPTSRQMNSSLRHRSTPELYGIYVINVQCQFCEYDVCMEPAKTLIEFQNWDTLLFCIQEGVKMFLKQEKLFVELSGEDIKEFSEDNGFSLFDATLQKRVTSDERSNFQEACNNILDSYEMFNLQSKAVKRKTTAENVNTQSSRDSEATRKNTNDAFLYIYESGGPGHSKMTEPSLQNKDSSCSESKMLEQETIVASEAGENEKHKKSFLEHSSLENPCGTSLEMFLSPFQTPCHFEESGQDLEIWKESTTVNGMAANILKNNRIQNQPKRFKDATEVGCQPLPFATTLWGVHSAQTEKEKKKESSNCGRRNVFSYGRVKLCSTGFITHVVQNEKTKSTETEHSFKNYVRPGPTRAQETFGNRTRHSVETPDIKDLASTLSKESGQLPNKKNCRTNISYGLENEPTATYTMFSAFQEGSKKSQTDCILSDTSPSFPWYRHVSNDSRKTDKLIGFSKPIVRKKLSLSSQLGSLEKFKRQYGKVENPLDTEVEESNGVTTNLSLQVEPDILLKDKNRLENSDVCKITTMEHSDSDSSCQPASHILNSEKFPFSKDEDCLEQQMPSLRESPMTLKELSLFNRKPLDLEKSSESLASKLSRLKGSERETQTMGMMSRFNELPNSDSSRKDSKLCSVLTQDFCMLFNNKHEKTENGVIPTSDSATQDNSFNKNSKTHSNSNTTENCVISETPLVLPYNNSKVTGKDSDVLIRASEQQIGSLDSPSGMLMNPVEDATGDQNGICFQSEESKARACSETEESNTCCSDWQRHFDVALGRMVYVNKMTGLSTFIAPTEDIQAACTKDLTTVAVDVVLENGSQYRCQPFRSDLVLPFLPRARAERTVMRQDNRDTVDDTVSSESLQSLFSEWDNPVFARYPEVAVDVSSGQAESLAVKIHNILYPYRFTKGMIHSMQVLQQVDNKFIACLMSTKTEENGEAGGNLLVLVDQHAAHERIRLEQLIIDSYEKQQAQGSGRKKLLSSTLIPPLEITVTEEQRRLLWCYHKNLEDLGLEFVFPDTSDSLVLVGKVPLCFVEREANELRRGRSTVTKSIVEEFIREQLELLQTTGGIQGTLPLTVQKVLASQACHGAIKFNDGLSLQESCRLIEALSSCQLPFQCAHGRPSMLPLADIDHLEQEKQIKPNLTKLRKMAQAWRLFGKAECDTRQSLQQSMPPCEPP

SEQ ID NO: 3 - DNA, 5533 bp, Mus musculus
gggagcgcgcgctcggcgttggaggtggttggtcggtgagagttgatggaggagattcgaggtgattattttccagtcagagaaggaagccagtgtctgccactccctccacatgtgtccctgccatgatcaggtgtctatcagatgacgtaaaaaccaagttgcgttccggtttagccataagctccttgggccagtgtgttgaagaacttacccttaacagtattgatgctgaagcaacatgtgtggccatcagagtgaatatggaaaccttccaagttcaagtgatagacaatggacttgggatggcgggggacgatgtagagaaggtgggaaaccggtattttactagtaaatgccactcagtgcgggacttggagaacccagcattttatggcttccgaggagaggccttggcaagtatagccgacatggctggtgctgtggagatttcatccaagaaaaacacaacactgaaaacctttgtgaaaatgtttcagaatggaaaagcccttgccacccatgaggctgatttgaccagaccaagtgtggggactacagtaacggtctataacctgttttaccagtttcctgtgcggaggaaaagcatggatcctagactagagtttgagaaagttcggcagagggtagaagctctctcacttatgcacccctccatttctttctctttgaggaacgatgtatctggatccatggttcttcagctccctaaaaccaaagacatatgctctcgattctgtcaaatttacggattgggcaagtcccaaaagttaagagaaatacgttttaaatacaaggaatttgagttcagtggctacatcagctctgaagcacactacaataagaatatgcagtttttgtttgtgaacagaagactagttttaagaacaaagttgcataaacttattgactttttattaagaaaagaaagcattatatgcaggccaaagaatggctctgccagtaggcaaatgaattcaagtcctcgacaccgttctgcctcagaactccacgggatatatgtaatcaatgtgcagtgccctttctgtgagtatgatgtctgcatagagccagccaaaactctgattgagtttcagagctgggataccgtgttgatttgtattcaggaaggagtaaaaaggtttttaaagcaagaaaaattatttgtagaattatcaggtgaagatattaaggaatttaatgaagataatggttttagtttgtttggcacgactcttcagacacatgtgtctactcatgagaagtgtgaccagagcagtttccgggaagcgtgtaataaaattctggattcctatgaaatgtttaatttgcagtcaaaagctgtgaaaagaatagctactctagaaaataaaaccagacaaaaccctggtgattcagaaactatcagaaaaaagacagtgggctcattgtacacagatgcatcggatggcccgtgctatagtaaatcggtagagtctgttttacaggacagcaacaacagtgcttacttagaaccgagggtgtcagaagaagaggtagccaaaacatcacactccggagaaaatgagaaatggaaaaaatcttttttggaaaataagacttcaggaaggatacatgaaaccagtccaaaaatgttttcaagccccatccaaatgcatcacctccttgaggagagagaggcagatctggaaatgcagacaataagtagtactgttaatgtcatggctgccaacattccccaaaataatgacattccgagtcaactggagaaatggaaagatgctcctgaagtggggtgccaacctctgccttttgagacaaccttattaagggtacggggtactcagaggaagaaggaaagaaggaaaaaggagcccagtagtcgtggaagagtaaatgtttttagttatggacaagttaaattatgctccactggctttataactcatgtagtacaaagtgagcacgctaaatcaactgaaacagaacattcatttaaaaattatgctcgacctggtcctgtaagtgcccaagaaacatttggaaaaagaacacaccatgcaattgagactccagacagcagtgatttaacaagcactttaagtaaagaatccagtcaaccgcccaacaaaaggttttgcagaacaaatacaggttacgggacagagaacaaacctgtagcaacagatgacaacttggctctttttcaggaaagctgtaaagaatcacacacagatcgccttttgcctgatgcatcctccttcccatggtgtagatatgtttccgatggttgtaggaaaatagataaaaggggttccttcaaacaggtagtccgtaggaagctaagcttgcgttcacaagtagggtctttagagaagtttaagaggcagtatgggaaggtcagcagttccctagatacagaaaaggataataacactgaagtcaggactcatcttgatcctcaaaatgaacccgatgttcttctgaaagacaagagccacttagatatgtctgatggttgtgagatcactactgtggagcacagtgagacttgtcaaccattaagtcccatcctgtacccagaaaaaattttattttccaaagaagatcgcttagaacagatgcctcatttgagagaaagtcctataactctggaagaattatctcactgtaacagaaaagctgatgttgagaagtccgctgcatcactggcttctaaattatccaaactaaaggattctgaaaaagagatgcaaaccgtggggatgacaggtcatactagtgaacttccagattcaaatcccagttggaaagataatagccagtgcactaggttagacttggatttttgtgaattattaaaaaacaaacttgaaaaaatagagagtgatatgcttccaatggcagattctgccacagaggatggtcccatcaataaaaacagtgaactacatcctaacaatacaacggatgacacagagaaaccagaaactcctttgctgttcccctgtaatgattctaaaatcagcagagattcagatgttcttatcagaacttcagaacaacctacaggaaaccctgactctgtcggtaaagtgataatgagtcaggtagaggatggcattggcagccaaggtggagtctgtccccagggtgatgaatctaaggcaagatcttgttccaaaaatgaaccaaacgcacactgtatggattggcagcagcattttgatgtaaccctgggaagaatggtttacatcaacagaatgacaggacttagcacattcgttgctccaactgacgaccttcatactgcttgtactaaagatctgacaactgtggctgtggatgtcctgcttgggaatgatgctgtggatgctgctgctgctgctgtcagtgaaccccttcagtctctgttttcagaatggagcaatccagtgtttgctcgatacccagaggttgctgttgatgtcagcagtggccaggctgagagcttagccgttaaaattcacaacgtcctgtatccctatcgcttcaccaaagagatgattcactcagtgaaggttctccagcaagtggataacaagtttattgcctgcttaatgagcacgaggatggatgaggatggccgaacaggtggaaacctgttagtcctggtggaccagcatgctgcccatgaacgcattcgtttggagcagcttattactgattcctatgagaaacaagatccacaaagcgctggccggaagaaattattgtcttccacaataatccctccactggcaatcaccgtgtcagaggaacaaaggagactcttacggtcttaccacaaacatttagaagatctggggcttgagttgctctttccagatgctagtgattctctgatcctggtgggaaaagtgccgctctgctttgtagagagagaagctagtgagcttcgaagaggacgctctactgtgactaagagtattgtggaggaattaattcgagaacaagtggagctgctccagaccacaggaggtatccaagggacactgccactgactgtccagaaggtgttggcctcccaggcctgccatggggctattaagtttaatgatcgtctgagcctagaagagagctgccgcctcatcgaagctctgtccttgtcccagctgccatttcagtgtgctcatgggagaccctcaatgctgcccttagctgacctggaccacttggagcaggaaaaacaggttaaacccaaccttgctaaacttcgcaaaatggttcgtgcctggcatctctttggaaaaacagagcagaacctgcagcagcctatacgtccttgtgagcctccatgaggagaggattctggagtgtaaggagacaagggagtgccgtgcatcccgagcaggagcagtgcagctgtgggcaggtcggcggccctgagcgggctggcacatcagtccccctgagcagatggagcaggcacgtgcactcaagcctaagggtagtttatttctttgcatccatgcacacaggagcttgacatataatacctatcttttgtaagttgatttagtgataaaatgtaatgattttgtaattggtgagttggcttatgtttgaggggcgcagctattgtttttagcagttttccccagcctctcagtttatattacgtgaggatgctaagccctaagcgctggtctgctcttctctgagcccctggctctgcccctccccatccatttctcttttgcatttgtctccttcacttcatacctctgcttcttcacattgtgctttacagacttacggtgtttctctgctcattataaaaatatttcccgccaggcagcggtggctcacacctttagtcccagtacttgggaggcagaggcaggtggatttctgatttcaaggccagcctggtctgcaaagtgagttccaggacagccacagggctacaaagagaaaccctgtctcaaaaaaaccaaaacaacaacaacaacaacaaaacttcctgatgtcttccagagagactaaattatattagggattaaaagttatttatagctgggtgtagtgacatatacctgtaatcctagtacctgggaggctgagacaagtccgtgacagggcaccatttgcctaggctggatatatagcaagaccttgactcaaaataaataagtaaactatagacaaagagagacacaaagacagaatagagaaagtttgaaaagaatttttttaattctcttggtaacctggctgtcctggaactggaactcagagatccccctttgctgcctccgagtgctgggattaacggtgcgcgccaccactgcctggcaagaaaaattacaaccctgtccctggtttttttgatagtcttactggtttttaaaaccagaggtgaatgtttctattctgaactaataaaacactaaaaaataatgggtttgtttttgaaaatgaatttgtactttataaaatgcttctgtgaaattaaaaaaaaaaaaaaaaa

SEQ ID NO: 4 - DNA, 5424 bp, Rattus norvegicus
ctggagcgaacaccggacgttggaggtggttagtccgtgagaattgatggaggagattcgaggtggttatttccagtcagagaaggaagccggtgtctgctactctctctgcatgtttccctgccatgatcaggtgtctgtcagatgaagtacaagccaagttgcgttctggtttagccctaagctccttaggccagtgtgttgaggaacttacccttaacagtattgatgctgaggcaacatgtgtggccatcagagtgaatatggaaaccttccaagttcaagtgatagacaacggacttgggatggcgggggatgacgtggagaaggtggggaaccggtattttactagtaaatgccactcagtacgggacctggagaacccaacgttttacggtttccgaggcgaggccttggcaagtatagctgacatggctagtgctgtggaaatttcatccaagaaaagcacaacattgaagacctttgtgaagatgtttcagaacggaaaagccctcgccgcccgtgaggcggacttgaccagaccgagtgtggggactacagtgacggtctataacctgttttaccagtttcctgtgcggaggaaaagcatggaccctagactagagtttgagaaggttaggcagagggtggaagccctctcacttatgcacccctccatttctttctctttgaggaatgacgtttctggttccatgattcttcagctccctaaaaccaaagacatatgttctcggttttgtcaaatttatggattgggcaagtcccaaaagttaagagaaatacattataagtataaggaatttgagtttaatggctacatcagctctgaagcacactacaataagaatatgcagtttttgtttgtgaacagaagactagttttaagaacaaagttgcataaacttattgactttttattaaggaaagaaagtattatatgcaggccaaagaatggctctgccagtaggcaaatgaattcaagtcctcgacaccgttctgcctcagaactccatgggatatatgtaatcaacgtgcagtgcccgttctgtgagtatgatgtctgcatagagccagccaaaactctgattgaattccagaactgggataccgtgttgatttgtgttcaggaaggaataaaaaagtttttaaagcaagaaaaattatttgtagaattatcaagtgaagatattaaggaatttaatgaagataatggttttagtttgattggtacaacacttcagacacagtctactcatgagaagtgtgaccagagcagtttccaggaagcgtgtaataatattttggattcctatgaaatgtttaatttgcagtcaaaagctgtgaaaagaatagctactttagaaaatagaaccacacaaaattctggcgattcaggagctatcagaaaaaagacagaggactcatacacttatgaatcagatgacctgggccatagaaaaactgtagagtctgcgttatacaacagtgacagtgcttacttaggatcaaggatgtcagaagaagacatagccaaaacatcacacgctggagaaaatgagaaatggaaaaaatctttgttggaaaataggacttcagaaaggccacatgaaaccagtccaaaaatgttttcaagccccattcaaactcatcatccccttgaggagagtgaggcagatctagaaatagagatgaaaagtagtactgttaatgtcatggctgccaacattcctccaaatagtgaaattcagagtcaactggagcaacttgaagatgctcctgaagtggagtgccaacctctgccctttgagacaacattattaagagcacagggtactctgaaaaagaaggagagaaaaaaggagctcagtagccatggaagagtaaatgtttttagttatggacaggttaaattgtgctccactggctttatcactcatgtggtacaacgcgaacccgccaagtcacctgaaacagaacagttgtttaaaaattatgctcgacctggtcctgtaagtgcccaggaagcatttggaaatagaacacaccatgcaagtgagactccagacagcagtagtttaacaagcactttaagtaaagaatccactcagccgccccacaaaagattctgcagaacaaatacaggttatgggacagagaacaaacctgtagcaacagatgacaacttggccctttttcagggaagccgtaaagaatcacacacagattgctttttgcctgatacaacctcctttccgtggtgtagaaatgtttccggtggttataagaaaaaaggtaaagtgggttccttcaaacacgtagtccgtaggaagctaagcttgcgttcacaaatagggtctttagagaagtttaagaggcaatatgggaaggttaacaattccctagctgcagaagaggacaatgacactgacttcaggacccatcttgagcctcacaatgaacccgatgttcttctgaaagataagagcctctcagatatgtctgatggtggtgagatcactccatcagagcacagtgatgggtgtcaaccattacgtcccatcctgtacccagagacactttccaaagaagatcgcttagaacagaggcctagtttgagagaaagtcctatcactctggcggaattgctccacggtaacagaaaaccttctgaggttaagaagtccactgaagccctggcttctaaattatccagactcaaggattctgaaaaagagatgcaaaccatggagatggcaggtcctgttagtgaacgtccagactcagatcccagttggaaagacaatagccagtgcgctaggctggacttaaatttttgtgaattatataaaaataaacttgaaaaaacagagagtgaagtgcttccaatgccagattctgccccagaggatgattccatcaataaaaacagcgtgctgtgttctaacagtgtaacagatgacagggagaaaccagaaacttccttgctgttaccctgtagtgattctaaaatcagcaaagattcagatgttcttatcagagtctcagagcaacagagtggaagccctgactctgccagcagggaggtaacgcgtcaggtagaagatagcgccggcagccaatgtggaatctgttcccagagccatgggtttaaagcaagatcttgttctgacaatgaagaatcaagtacgcacagtatggactggcagcagcattttgacgtaaccctgggaagaacggtttacatcaacagaatgaccgggcttagcacgtttgttgctcctactgatgacattcagactccttgtactaaagatctgacaaccgtggctgtggatgtcctacttgggaatggggtccagtacaggtgtcatccttttagaagcgaccttgttcttcctttcctcccaagagctcaggaagagaggaccaggcggagacacaacagagatgctgtagatgctgctgctgtcagtgaaccacttcagtctttgttttcagaatggagcaatccagtgtttgcccgatacccagaggttgctgttgacgtcagcagtggccaggctgggagcttagccgttaagattcacaatgttctatatccctatcgcttcaccaaagagatgatccactcagtgcaggttctccagcaagtggataacaagtttatcgcctgcttaatgagctcgaggacggacgggagtggccaagcaggtggaaacctgttagtcctggtggaccagcacgctgcccatgagcgcgttcgtttggagcagctaatcactgattcctatgagaaacaagctccacaaagtgctggccggaagaaattactgtcttccacaataattcctccactagcgatcaccgtgtcagaggaacaaaggagactcttacggtcttaccacaaacatttggaagatctgggacttgagttgctctttccagatgctagtgactcttcgatcctggtgggaaaagtgccactctgctttgtagaaagagaagctaatgaacttcgaagaggacgatctcctgtgactaagagtattgtggaggaattgattcgagaacagctggagctgctccagaccacgggaggtatccaagggacactgccgctgactgtccagaaggtgttggcctcccaggcctgccacggggccattaagtttaatgatcgtctgagtctggaggagagctgtcggcttatcgaagctctgtccttgtgccagctgccatttcagtgtgctcatgggcgaccttcaatgctgcccttagctgacctggaccacttggagcaggaaaaacaggttaaacccaatcttactaaacttcgcaaaatggctcatgcctggcatctctttggaaaagcagaaggctgtgatacaaagcaggagccacaacagcccgtacctccttgtgagccaccgtgagaagagttataaggagatgggtgctgtgcccctgcgcgagcggagagcagtacagctgtgagcggtcgctggccctgggtcgctggcacatctgtcctggggcagtggagcaggcagatgcactcaagcctgagggagttgagttctttgcatccacagacacaggagtttgcacatagttcctatcttttgtaaattgacttagtgataagatgtaatgactctgaggttggtcggttggcttatgtttgaagggtgcagcagttgattttgagcagctttccccagcctctcagttcacattacgtgaggatgccctgagccctggtctgcctttctccaagcccctggtgcagcctctccgtccatccctcttttgcatttgtcttcttagcctcactcctctgcttcttcacattttgcattacagacatatggtgtctctgctcgctataaaaatatttcctgatgtcttccagagagactttaaattatattagggattaaaagttatttatagctgggtgtggtggtttacctgtaatcctagtcgcagggaggctgaggcaagtccacagcagggcaccattagccgaggctgtacatgcaagaccctgcttaaaataaataaatatgctactgacaaagagaaacacaaagatagaatagagaaagtttgaaaaaattttttaattcttttgatagcctggactgttctggaacttgctttgtagaccaggctaacctcaaactcaagagatccacctgcctctgcctcccaagtgctgggattaaaggtgtgcgccaccactgcctagaaagaaaaattgcaatcttatccctggtttttgatagtcctacggtttttaaaaccagaagtcagtgtttatatcctgaaccaataaaacattaaaaaatactaggtctgtttttgaaaatgaatttgttactttataaaatgtttctgtga

SEQ ID NO: 5 - DNA, 5028 bp, Macaca fascicularis
cacacgggaaaaaaacaaacaaacataaaaacaaaagtaaaagttacgacatagtctttcacaccatgccaaaaggggataaggattgagactgtaggtacccgttcactgaaccctggaatgcggatccttggctggaacacctgacgcgcatgcgcactggtgtgtcgtggcctggcgcgcccctccgaagagcatgctcgtggactcgcacgtgcacgagcctcaagacccaaggtgcgcgcgtcggcgtcccaggcggttggtgtccgagaattggttaagctggactcgaggcaattatttcccgtcagagaaggaaaccattgcttggcattctcaccatctttctacctaccatgatcaagtgcttgtcagttgaagtacaagccaaattgcgttctggtttggccataagctccttgggccaatgtgttgaggaacttgccctcaacagtattgatgctgaagcaaaatgtgtggctgtcagggtgaatatggaaaccttccaagttcaagtgatagacaatggatttgggatggggagtgatgatgtagagaaagtgggaaatcgttatttcaccagtaaatgccactcggtacaggacttggagaatccaaggttttatggtttccgaggagaggccttggcaaatattgccgacatggccagcgctgtggaaatttcgtccaagaaaaacaggacaatgaaaacttttgtgaaactgtttcagagtggaaaagccctgaaagcttgtgaagctgatgtgactagaccaagcggtgggaccactgtaacagtgtataacctattttaccagctgcctgtaaggaggaaatgcatggaccctagactggagtttgagaaggttaggcagaggatagaagctctctcacttatgcacccttccatctctttctctttgagaaatgatgtttctggttccatggttcttcaactccctaaaaccaaagacgtatgttcccgattttgtcaaatttatggattgggaaagtcccaaaagctgagagaaatcagttttaaatataaacagtttgagcttagtggctatatcagctctgaagcacattacaataagaatatgcagtttttgtttgtgaacaaaagactggttttaaggacaaagctacataaactcattgactttttattaaggaaagagagtattatatgcaagccaaagaacggttccaccagtaggcaaatgagttcaagtcttcggcaccggtctaccccagaactctatggcatatatgtaattaatgtgcagtgccaattctgtgagtatgatgtgtgcatggagccagccaaaactctgattgagtttcagaactgggacactctcttgttttgtattcaggaaggagtgaaaatgtttttaaagcaagaaaaattatttgtggaattatcaggtgaggatattaaggaatttagtgaagataatggttttaatttatttgatgctactcttcagaagcgtgtgacttccgatgagaggagtaaccagggcagtttccaggaagcatgtaataatattttagattcctatgagatgtttaatttgcaatcaaaatctgtgaaaagaaaagctactgcagaaaacataagcacacagaattctagggatttagaagctatcagaaaaaatacaaatgatgtatttttgtgcatttatgaatcaggtggtccaggccatagcaaaatgacagagccatctttacaaaacaaagacagctcttgctcagaatccaagatgttagaacaagagacaattgtagcatcagaagcaggagaaaatgagaaacataaaaaatcttgcctggaacatagctctttagaaaacccatgtggaaccagttcagaaatgtttttaagcccttttcagacaccatgtcactttgaagagagtggggaggatctagaaatatggaaagaaagtactactgttaatgacatggctgccaacgtcatgaaaaataatagaattcagaatcaaccagagagatttaaagatgctactgaagtgggatgccagcctctgccttttgcgacaacattattgggagtacatagtgttcagacagagaaggagaaaaaaaaagagcctagcaattgtggaggaagaaatgtttttagttacggacgagttaaattatgttccactggctttataactcatatagtacaaaatgagaaaactaaatcaactgaaacagaacatgcatttaaaaattatgttagacctggtcccacacgtgcccaagaaacatttggaaatagaacacgtcattcagttgaaactctagacctcaaagatttagctggcactttaagtagagaatctggtcaattgcccaacaaaaaaatttgcagaacaaatataagttgtgggctagagaatgaacctacagcaacttatgcaaagttttctacttttcagcaagatagcaaaaaatcacaaacaggttgcatattatctgatacatccccctctttcccctggtatagacacgtttcaaatgatagtaggaaaacagataaattaattggttcctccaaaccaatcgtccgtaagaagctaagcttgagttcacagctaggatctttagagaagtttaagaggcaatatgggaaggttgaaaatcctctggatacagaagtagaggaaagtaacggagtcactaccaatctcagtcctcaagttgaacctgacattctgctgaagaacaagaactgcttagacaactctgatgtttgtaaaatcactactatgaagcataatgattcagatagtagttgccaaccagtaagccacgtccttgactcagagaagcttccattctccaaggatgaagattgtttagaacaacagatgcctagtttgagagaaagccctatgaccctgaaggagttatctctctttaatagaaaacctttggaccttgagaagtcatctgaatcactagcctctaaattatccagacggaagggttccgaaagagaaactcaaacaatggagatgatgagtcgttttaatgaacttccaaattcagattccagtaggaaagagagcaagttgtgcagtgtgttaacacaagatttttgtatgttatttaaaaatgagcatgaaaaaacagagaatggtgtcatcccaacatcagattctgccacacaggatatttcctttaataaaaatagtaaaacacattctaacagcaatacaacagagaactgtgtgatatcagaaactcctttggtattgccctatgataattttaaagttaccagtaaagattcagatgttcttatcagagcttcagaacaacacacaggaagtccggactctcccagtggaatgttaatgaatctggtagacgatgccacaggtgaccaaaatggaatttgttttcaaagtgaggaatctaaagcaagagcttgttctgaaactgaagagtcaaacacgtgttgctcgaattggcagcagcatttcgatgtagccctggggagaatggtttatgtcaacaaaatgactggactcagcacattcattgccccaactgaggacattcaggctgcttgtactaaagacctgacaactgtggctgtggatgtcgtacttgagaatgggtctcagtacaggtgtcatccttttagaagcgaccttgttcttcctttccttccgagagctcgagcagagaggactgtgatgagacaggataacagagatactgtggatgataccattagtagcgaattgcttcagtctttgttctcagaatgggacaatccagtatttgcccgttatccagaggttgctgttgatgtaagcagtggccaggctgagagcttagcagttaaaattcacaacatcttgtatccctatcgtttcaccaaagaaatgattcattcaatgcaggttctccagcaagttgatagcaagtttattgcctgtttgatgagcactaagactgaagagaatggcgaggcaggtggaaacctgctcgtgctggtggatcagcacgctgcccatgagcgtatccgtctggagcagcttatcattgattcctatgagaagcaacaggcacaaggctctggtcggaaaaaattactgtcttctactctaattcctccactagagataacagtgacagaggaacaaaggagacttttatggtgttaccacaaaaatctggaagatctgggccttgaacttgtatttccagacactagtgattctctggtacttgtgggaaaagtaccactctgttttgtggaaagagaagccaatgaacttcggagaggaagatctactgtgaccaagagtatcgtggaggaatttatccgagaacaagtggagctgctccagaccacaggaggcatccaagggacattgccactgactgtccagaaggtgttggcatcccaagcctgccatggggccattaagtttaatgatggcctgagcttacaggaaagttgccgccttattgaaactctgtcctcatgccagctgccattccagtgtgctcacgggagaccttctatgctgccattagctgacatagaccacttggagcaggaaaaacagattaaacccaatctcgctaaacttcgcaaaatggcccaggcctggcgtctctttggaaaagcagagtgtgatacaacgcagagcctgcagcaatccatgcctccctgtgagccaccatgagaacagaatcactggtctaaaggaacaaagggattttcactgtatgcctctgagcagagagcagcagcagcaggtaccagcacggccctgactgaatcagcccagtgtccctgagcagcttagacaacagggctctttgtatcagtatttcttgagcagatgattcctctagttgagtagccagatggaattcaagcctaaagacagttcattcatttgcatccatggacacagaaggttgccatatagtatctaccttttgctacttatttaatgataaaatttaatgatcgtttga

SEQ ID NO: 6 - DNA, 20 bp, Artificial sequence
  Synthetic oligonucleotide
cttggatcttgaggctcgtg

SEQ ID NO: 7 - DNA, 20 bp, Artificial sequence
  Synthetic oligonucleotide
ccttggatcttgaggctcgt

SEQ ID NO: 8 - DNA, 20 bp, Artificial sequence
  Synthetic oligonucleotide
accttggatcttgaggctcg

SEQ ID NO: 9 - DNA, 20 bp, Artificial sequence
  Synthetic oligonucleotide
caccttggatcttgaggctc

SEQ ID NO: 10 - DNA, 20 bp, Artificial sequence
  Synthetic oligonucleotide
gcaccttggatcttgaggct

SEQ ID NO: 11 - DNA, 20 bp, Artificial sequence
  Synthetic oligonucleotide
aattctccgacaccaaccgc

SEQ ID NO: 12 - DNA, 20 bp, Artificial sequence
  Synthetic oligonucleotide
aaattctccgacaccaaccg

SEQ ID NO: 13 - DNA, 20 bp, Artificial sequence
  Synthetic oligonucleotide
caaattctccgacaccaacc

SEQ ID NO: 14 - DNA, 20 bp, Artificial sequence
  Synthetic oligonucleotide
acaaattctccgacaccaac

SEQ ID NO: 15 - DNA, 20 bp, Artificial sequence
  Synthetic oligonucleotide
aacaaattctccgacaccaa

SEQ ID NO: 16 - DNA, 20 bp, Artificial sequence
  Synthetic oligonucleotide
taacaaattctccgacacca

SEQ ID NO: 17 - DNA, 20 bp, Artificial sequence
  Synthetic oligonucleotide
ttaacaaattctccgacacc

SEQ ID NO: 18 - DNA, 20 bp, Artificial sequence
  Synthetic oligonucleotide
cttaacaaattctccgacac

SEQ ID NO: 19 - DNA, 20 bp, Artificial sequence
  Synthetic oligonucleotide
gcttaacaaattctccgaca

SEQ ID NO: 20 - DNA, 20 bp, Artificial sequence
  Synthetic oligonucleotide
cgcttaacaaattctccgac

SEQ ID NO: 21 - DNA, 20 bp, Artificial sequence
  Synthetic oligonucleotide
ccgcttaacaaattctccga

SEQ ID NO: 22 - DNA, 20 bp, Artificial sequence
  Synthetic oligonucleotide
cccgcttaacaaattctccg

SEQ ID NO: 23 - DNA, 20 bp, Artificial sequence
  Synthetic oligonucleotide
tcccgcttaacaaattctcc

SEQ ID NO: 24 - DNA, 20 bp, Artificial sequence
  Synthetic oligonucleotide
gtcccgcttaacaaattctc

SEQ ID NO: 25 - DNA, 20 bp, Artificial sequence
  Synthetic oligonucleotide
agtcccgcttaacaaattct

SEQ ID NO: 26 - DNA, 20 bp, Artificial sequence
  Synthetic oligonucleotide
gagtcccgcttaacaaattc

SEQ ID NO: 27 - DNA, 20 bp, Artificial sequence
  Synthetic oligonucleotide
ggagtcccgcttaacaaatt

SEQ ID NO: 28 - DNA, 20 bp, Artificial sequence
  Synthetic oligonucleotide
tggagtcccgcttaacaaat

SEQ ID NO: 29 - DNA, 20 bp, Artificial sequence
  Synthetic oligonucleotide
ctggagtcccgcttaacaaa

SEQ ID NO: 30 - DNA, 20 bp, Artificial sequence
  Synthetic oligonucleotide
cctggagtcccgcttaacaa

SEQ ID NO: 31 - DNA, 20 bp, Artificial sequence
  Synthetic oligonucleotide
ttgcctggagtcccgcttaa

SEQ ID NO: 32 - DNA, 20 bp, Artificial sequence
  Synthetic oligonucleotide
attgcctggagtcccgctta

SEQ ID NO: 33 - DNA, 20 bp, Artificial sequence
  Synthetic oligonucleotide
aattgcctggagtcccgctt

SEQ ID NO: 34 - DNA, 20 bp, Artificial sequence
  Synthetic oligonucleotide
taattgcctggagtcccgct

SEQ ID NO: 35 - DNA, 20 bp, Artificial sequence
  Synthetic oligonucleotide
ataattgcctggagtcccgc

SEQ ID NO: 36 - DNA, 20 bp, Artificial sequence
  Synthetic oligonucleotide
aataattgcctggagtcccg

SEQ ID NO: 37 - DNA, 20 bp, Artificial sequence
  Synthetic oligonucleotide
aaataattgcctggagtccc

SEQ ID NO: 38 - DNA, 20 bp, Artificial sequence
  Synthetic oligonucleotide
gaaataattgcctggagtcc

SEQ ID NO: 39 - DNA, 20 bp, Artificial sequence
  Synthetic oligonucleotide
ggaaataattgcctggagtc

SEQ ID NO: 40 - DNA, 20 bp, Artificial sequence
  Synthetic oligonucleotide
tggaaataattgcctggagt

SEQ ID NO: 41 - DNA, 20 bp, Artificial sequence
  Synthetic oligonucleotide
ctggaaataattgcctggag

SEQ ID NO: 42 - DNA, 20 bp, Artificial sequence
  Synthetic oligonucleotide
actggaaataattgcctgga

SEQ ID NO: 43 - DNA, 20 bp, Artificial sequence
  Synthetic oligonucleotide
gactggaaataattgcctgg

SEQ ID NO: 44 - DNA, 20 bp, Artificial sequence
  Synthetic oligonucleotide
tgactggaaataattgcctg

SEQ ID NO: 45 - DNA, 20 bp, Artificial sequence
  Synthetic oligonucleotide
ctgactggaaataattgcct

SEQ ID NO: 46 - DNA, 20 bp, Artificial sequence
  Synthetic oligonucleotide
tctgactggaaataattgcc

SEQ ID NO: 47 - DNA, 20 bp, Artificial sequence
  Synthetic oligonucleotide
ctctgactggaaataattgc

SEQ ID NO: 48 - DNA, 20 bp, Artificial sequence
  Synthetic oligonucleotide
tctctgactggaaataattg

SEQ ID NO: 49 - DNA, 20 bp, Artificial sequence
  Synthetic oligonucleotide
ttctctgactggaaataatt

SEQ ID NO: 50 - DNA, 20 bp, Artificial sequence
  Synthetic oligonucleotide
cttctctgactggaaataat

SEQ ID NO: 51 - DNA, 20 bp, Artificial sequence
  Synthetic oligonucleotide
ccttctctgactggaaataa

SEQ ID NO: 52 - DNA, 20 bp, Artificial sequence
  Synthetic oligonucleotide
tccttctctgactggaaata

SEQ ID NO: 53 - DNA, 20 bp, Artificial sequence
  Synthetic oligonucleotide
ttccttctctgactggaaat

SEQ ID NO: 54 - DNA, 20 bp, Artificial sequence
  Synthetic oligonucleotide
gtttccttctctgactggaa

SEQ ID NO: 55 - DNA, 20 bp, Artificial sequence
  Synthetic oligonucleotide
ggtttccttctctgactgga

SEQ ID NO: 56 - DNA, 20 bp, Artificial sequence
  Synthetic oligonucleotide
tggtttccttctctgactgg

SEQ ID NO: 57 - DNA, 20 bp, Artificial sequence
  Synthetic oligonucleotide
ctggtttccttctctgactg

SEQ ID NO: 58 - DNA, 20 bp, Artificial sequence
  Synthetic oligonucleotide
actggtttccttctctgact

SEQ ID NO: 59 - DNA, 20 bp, Artificial sequence
  Synthetic oligonucleotide
cactggtttccttctctgac

SEQ ID NO: 60 - DNA, 20 bp, Artificial sequence
  Synthetic oligonucleotide
gcactggtttccttctctga

SEQ ID NO: 61 - DNA, 20 bp, Artificial sequence
  Synthetic oligonucleotide
ggcactggtttccttctctg

SEQ ID NO: 62 - DNA, 20 bp, Artificial sequence
  Synthetic oligonucleotide
aggcactggtttccttctct

SEQ ID NO: 63 - DNA, 20 bp, Artificial sequence
  Synthetic oligonucleotide
agatggtgagaatgccaggc

SEQ ID NO: 64 - DNA, 20 bp, Artificial sequence
  Synthetic oligonucleotide
aagatggtgagaatgccagg

SEQ ID NO: 65 - DNA, 20 bp, Artificial sequence
  Synthetic oligonucleotide
aaagatggtgagaatgccag

SEQ ID NO: 66 - DNA, 20 bp, Artificial sequence
  Synthetic oligonucleotide
agaaagatggtgagaatgcc

SEQ ID NO: 67 - DNA, 20 bp, Artificial sequence
  Synthetic oligonucleotide
tagaaagatggtgagaatgc

SEQ ID NO: 68 - DNA, 20 bp, Artificial sequence
  Synthetic oligonucleotide
gtagaaagatggtgagaatg

SEQ ID NO: 69 - DNA, 20 bp, Artificial sequence
  Synthetic oligonucleotide
ggtagaaagatggtgagaat

SEQ ID NO: 70 - DNA, 20 bp, Artificial sequence
  Synthetic oligonucleotide
aggtagaaagatggtgagaa

SEQ ID NO: 71 - DNA, 20 bp, Artificial sequence
  Synthetic oligonucleotide
taggtagaaagatggtgaga

SEQ ID NO: 72 - DNA, 20 bp, Artificial sequence
  Synthetic oligonucleotide
gtaggtagaaagatggtgag

SEQ ID NO: 73 - DNA, 20 bp, Artificial sequence
  Synthetic oligonucleotide
ggtaggtagaaagatggtga

SEQ ID NO: 74 - DNA, 20 bp, Artificial sequence
  Synthetic oligonucleotide
tggtaggtagaaagatggtg

SEQ ID NO: 75 - DNA, 20 bp, Artificial sequence
  Synthetic oligonucleotide
atggtaggtagaaagatggt

SEQ ID NO: 76 - DNA, 20 bp, Artificial sequence
  Synthetic oligonucleotide
catggtaggtagaaagatgg

SEQ ID NO: 77 - DNA, 20 bp, Artificial sequence
  Synthetic oligonucleotide
tcatggtaggtagaaagatg

SEQ ID NO: 78 - DNA, 20 bp, Artificial sequence
  Synthetic oligonucleotide
atcatggtaggtagaaagat

SEQ ID NO: 79 - DNA, 20 bp, Artificial sequence
  Synthetic oligonucleotide
gatcatggtaggtagaaaga

SEQ ID NO: 80 - DNA, 20 bp, Artificial sequence
  Synthetic oligonucleotide
tgatcatggtaggtagaaag

SEQ ID NO: 81 - DNA, 20 bp, Artificial sequence
  Synthetic oligonucleotide
ttgatcatggtaggtagaaa

SEQ ID NO: 82 - DNA, 20 bp, Artificial sequence
  Synthetic oligonucleotide
cttgatcatggtaggtagaa

SEQ ID NO: 83 - DNA, 20 bp, Artificial sequence
  Synthetic oligonucleotide
acttgatcatggtaggtaga

SEQ ID NO: 84 - DNA, 20 bp, Artificial sequence
  Synthetic oligonucleotide
cacttgatcatggtaggtag

SEQ ID NO: 85 - DNA, 20 bp, Artificial sequence
  Synthetic oligonucleotide
gcacttgatcatggtaggta

SEQ ID NO: 86 - DNA, 20 bp, Artificial sequence
  Synthetic oligonucleotide
agcacttgatcatggtaggt

SEQ ID NO: 87 - DNA, 20 bp, Artificial sequence
  Synthetic oligonucleotide
aagcacttgatcatggtagg

SEQ ID NO: 88 - DNA, 20 bp, Artificial sequence
  Synthetic oligonucleotide
acttcaactgacaagcactt

SEQ ID NO: 89 - DNA, 20 bp, Artificial sequence
  Synthetic oligonucleotide
tacttcaactgacaagcact

SEQ ID NO: 90 - DNA, 20 bp, Artificial sequence
  Synthetic oligonucleotide
gtacttcaactgacaagcac

SEQ ID NO: 91 - DNA, 20 bp, Artificial sequence
  Synthetic oligonucleotide
tgtacttcaactgacaagca

SEQ ID NO: 92 - DNA, 20 bp, Artificial sequence
  Synthetic oligonucleotide
ttgtacttcaactgacaagc

SEQ ID NO: 93 - DNA, 20 bp, Artificial sequence
  Synthetic oligonucleotide
gcttgtacttcaactgacaa

SEQ ID NO: 94 - DNA, 20 bp, Artificial sequence
  Synthetic oligonucleotide
ggcttgtacttcaactgaca

SEQ ID NO: 95 - DNA, 20 bp, Artificial sequence
  Synthetic oligonucleotide
tggcttgtacttcaactgac

SEQ ID NO: 96 - DNA, 20 bp, Artificial sequence
  Synthetic oligonucleotide
ttggcttgtacttcaactga

SEQ ID NO: 97 - DNA, 20 bp, Artificial sequence
  Synthetic oligonucleotide
tttggcttgtacttcaactg

SEQ ID NO: 98 - DNA, 20 bp, Artificial sequence
  Synthetic oligonucleotide
atttggcttgtacttcaact

SEQ ID NO: 99 - DNA, 20 bp, Artificial sequence
  Synthetic oligonucleotide
aatttggcttgtacttcaac

SEQ ID NO: 100 - DNA, 20 bp, Artificial sequence
  Synthetic oligonucleotide
caatttggcttgtacttcaa

SEQ ID NO: 101 - DNA, 20 bp, Artificial sequence
  Synthetic oligonucleotide
gcaatttggcttgtacttca

SEQ ID NO: 102 - DNA, 20 bp, Artificial sequence
  Synthetic oligonucleotide
cgcaatttggcttgtacttc

SEQ ID NO: 103 - DNA, 20 bp, Artificial sequence
  Synthetic oligonucleotide
acgcaatttggcttgtactt

SEQ ID NO: 104 - DNA, 20 bp, Artificial sequence
  Synthetic oligonucleotide
aacgcaatttggcttgtact

SEQ ID NO: 105 - DNA, 20 bp, Artificial sequence
  Synthetic oligonucleotide
gaacgcaatttggcttgtac

SEQ ID NO: 106 - DNA, 20 bp, Artificial sequence
  Synthetic oligonucleotide
agaacgcaatttggcttgta

SEQ ID NO: 107 - DNA, 20 bp, Artificial sequence
  Synthetic oligonucleotide
cagaacgcaatttggcttgt

SEQ ID NO: 108 - DNA, 20 bp, Artificial sequence
  Synthetic oligonucleotide
ccagaacgcaatttggcttg

SEQ ID NO: 109 - DNA, 20 bp, Artificial sequence
  Synthetic oligonucleotide
accagaacgcaatttggctt

SEQ ID NO: 110 - DNA, 20 bp, Artificial sequence
  Synthetic oligonucleotide
aaccagaacgcaatttggct

SEQ ID NO: 111 - DNA, 20 bp, Artificial sequence
  Synthetic oligonucleotide
aaaccagaacgcaatttggc

SEQ ID NO: 112 - DNA, 20 bp, Artificial sequence
  Synthetic oligonucleotide
ccaaaccagaacgcaatttg

SEQ ID NO: 113 - DNA, 20 bp, Artificial sequence
  Synthetic oligonucleotide
gccaaaccagaacgcaattt

SEQ ID NO: 114 - DNA, 20 bp, Artificial sequence
  Synthetic oligonucleotide
ttggcccaaggagcttatgg

SEQ ID NO: 115 - DNA, 20 bp, Artificial sequence
  Synthetic oligonucleotide
attggcccaaggagcttatg

SEQ ID NO: 116 - DNA, 20 bp, Artificial sequence
  Synthetic oligonucleotide
cattggcccaaggagcttat

SEQ ID NO: 117 - DNA, 20 bp, Artificial sequence
  Synthetic oligonucleotide
acattggcccaaggagctta

SEQ ID NO: 118 - DNA, 20 bp, Artificial sequence
  Synthetic oligonucleotide
cacattggcccaaggagctt

SEQ ID NO: 119 - DNA, 20 bp, Artificial sequence
  Synthetic oligonucleotide
acacattggcccaaggagct

SEQ ID NO: 120 - DNA, 20 bp, Artificial sequence
  Synthetic oligonucleotide
aacacattggcccaaggagc

SEQ ID NO: 121 - DNA, 20 bp, Artificial sequence
  Synthetic oligonucleotide
caacacattggcccaaggag

SEQ ID NO: 122 - DNA, 20 bp, Artificial sequence
  Synthetic oligonucleotide
tcaacacattggcccaagga

SEQ ID NO: 123 - DNA, 20 bp, Artificial sequence
  Synthetic oligonucleotide
ctcaacacattggcccaagg

SEQ ID NO: 124 - DNA, 20 bp, Artificial sequence
  Synthetic oligonucleotide
cctcaacacattggcccaag

SEQ ID NO: 125 - DNA, 20 bp, Artificial sequence
  Synthetic oligonucleotide
tcctcaacacattggcccaa

SEQ ID NO: 126 - DNA, 20 bp, Artificial sequence
  Synthetic oligonucleotide
ttcctcaacacattggccca

SEQ ID NO: 127 - DNA, 20 bp, Artificial sequence
  Synthetic oligonucleotide
gttcctcaacacattggccc

SEQ ID NO: 128 - DNA, 20 bp, Artificial sequence
  Synthetic oligonucleotide
agttcctcaacacattggcc

SEQ ID NO: 129 - DNA, 20 bp, Artificial sequence
  Synthetic oligonucleotide
aagttcctcaacacattggc

SEQ ID NO: 130 - DNA, 20 bp, Artificial sequence
  Synthetic oligonucleotide
caagttcctcaacacattgg

SEQ ID NO: 131 - DNA, 20 bp, Artificial sequence
  Synthetic oligonucleotide
gcaagttcctcaacacattg

SEQ ID NO: 132 - DNA, 20 bp, Artificial sequence
  Synthetic oligonucleotide
ggcaagttcctcaacacatt

SEQ ID NO: 133 - DNA, 20 bp, Artificial sequence
  Synthetic oligonucleotide
gggcaagttcctcaacacat

SEQ ID NO: 134 - DNA, 20 bp, Artificial sequence
  Synthetic oligonucleotide
agggcaagttcctcaacaca

SEQ ID NO: 135 - DNA, 20 bp, Artificial sequence
  Synthetic oligonucleotide
actgttgagggcaagttcct

SEQ ID NO: 136 - DNA, 20 bp, Artificial sequence
  Synthetic oligonucleotide
tactgttgagggcaagttcc

SEQ ID NO: 137 - DNA, 20 bp, Artificial sequence
  Synthetic oligonucleotide
atactgttgagggcaagttc

SEQ ID NO: 138 - DNA, 20 bp, Artificial sequence
  Synthetic oligonucleotide
aatactgttgagggcaagtt

SEQ ID NO: 139 - DNA, 20 bp, Artificial sequence
  Synthetic oligonucleotide
caatactgttgagggcaagt

SEQ ID NO: 140 - DNA, 20 bp, Artificial sequence
  Synthetic oligonucleotide
tcaatactgttgagggcaag

SEQ ID NO: 141 - DNA, 20 bp, Artificial sequence
  Synthetic oligonucleotide
atcaatactgttgagggcaa

SEQ ID NO: 142 - DNA, 20 bp, Artificial sequence
  Synthetic oligonucleotide
catcaatactgttgagggca

SEQ ID NO: 143 - DNA, 20 bp, Artificial sequence
  Synthetic oligonucleotide
gcatcaatactgttgagggc

SEQ ID NO: 144 - DNA, 20 bp, Artificial sequence
  Synthetic oligonucleotide
agcatcaatactgttgaggg

SEQ ID NO: 145 - DNA, 20 bp, Artificial sequence
  Synthetic oligonucleotide
cagcatcaatactgttgagg

SEQ ID NO: 146 - DNA, 20 bp, Artificial sequence
  Synthetic oligonucleotide
tcagcatcaatactgttgag

SEQ ID NO: 147 - DNA, 20 bp, Artificial sequence
  Synthetic oligonucleotide
ttcagcatcaatactgttga

SEQ ID NO: 148 - DNA, 20 bp, Artificial sequence
  Synthetic oligonucleotide
cttcagcatcaatactgttg

SEQ ID NO: 149 - DNA, 20 bp, Artificial sequence
  Synthetic oligonucleotide
agccacacattttgcttcag

SEQ ID NO: 150 - DNA, 20 bp, Artificial sequence
  Synthetic oligonucleotide
cagccacacattttgcttca

SEQ ID NO: 151 - DNA, 20 bp, Artificial sequence
  Synthetic oligonucleotide
acagccacacattttgcttc

SEQ ID NO: 152 - DNA, 20 bp, Artificial sequence
  Synthetic oligonucleotide
gacagccacacattttgctt

SEQ ID NO: 153 - DNA, 20 bp, Artificial sequence
  Synthetic oligonucleotide
tgacagccacacattttgct

SEQ ID NO: 154 - DNA, 20 bp, Artificial sequence
  Synthetic oligonucleotide
ctgacagccacacattttgc

SEQ ID NO: 155 - DNA, 20 bp, Artificial sequence
  Synthetic oligonucleotide
cctgacagccacacattttg

SEQ ID NO: 156 - DNA, 20 bp, Artificial sequence
  Synthetic oligonucleotide
ccctgacagccacacatttt

SEQ ID NO: 157 - DNA, 20 bp, Artificial sequence
  Synthetic oligonucleotide
accctgacagccacacattt

SEQ ID NO: 158 - DNA, 20 bp, Artificial sequence
  Synthetic oligonucleotide
caccctgacagccacacatt

SEQ ID NO: 159 - DNA, 20 bp, Artificial sequence
  Synthetic oligonucleotide
tcaccctgacagccacacat

SEQ ID NO: 160 - DNA, 20 bp, Artificial sequence
  Synthetic oligonucleotide
ttcaccctgacagccacaca

SEQ ID NO: 161 - DNA, 20 bp, Artificial sequence
  Synthetic oligonucleotide
attcaccctgacagccacac

SEQ ID NO: 162 - DNA, 20 bp, Artificial sequence
  Synthetic oligonucleotide
tattcaccctgacagccaca

SEQ ID NO: 163 - DNA, 20 bp, Artificial sequence
  Synthetic oligonucleotide
atattcaccctgacagccac

SEQ ID NO: 164 - DNA, 20 bp, Artificial sequence
  Synthetic oligonucleotide
catattcaccctgacagcca

SEQ ID NO: 165 - DNA, 20 bp, Artificial sequence
  Synthetic oligonucleotide
ccatattcaccctgacagcc

SEQ ID NO: 166 - DNA, 20 bp, Artificial sequence
  Synthetic oligonucleotide
tccatattcaccctgacagc

SEQ ID NO: 167 - DNA, 20 bp, Artificial sequence
  Synthetic oligonucleotide
ttccatattcaccctgacag

SEQ ID NO: 168 - DNA, 20 bp, Artificial sequence
  Synthetic oligonucleotide
tttccatattcaccctgaca

SEQ ID NO: 169 - DNA, 20 bp, Artificial sequence
  Synthetic oligonucleotide
gtttccatattcaccctgac

SEQ ID NO: 170 - DNA, 20 bp, Artificial sequence
  Synthetic oligonucleotide
ggtttccatattcaccctga

SEQ ID NO: 171 - DNA, 20 bp, Artificial sequence
  Synthetic oligonucleotide
aggtttccatattcaccctg

SEQ ID NO: 172 - DNA, 20 bp, Artificial sequence
  Synthetic oligonucleotide
aaggtttccatattcaccct

SEQ ID NO: 173 - DNA, 20 bp, Artificial sequence
  Synthetic oligonucleotide
gaaggtttccatattcaccc

SEQ ID NO: 174 - DNA, 20 bp, Artificial sequence
  Synthetic oligonucleotide
acttgaacttggaaggtttc

SEQ ID NO: 175 - DNA, 20 bp, Artificial sequence
  Synthetic oligonucleotide
cacttgaacttggaaggttt

SEQ ID NO: 176 - DNA, 20 bp, Artificial sequence
  Synthetic oligonucleotide
tcacttgaacttggaaggtt

SEQ ID NO: 177 - DNA, 20 bp, Artificial sequence
  Synthetic oligonucleotide
atcacttgaacttggaaggt

SEQ ID NO: 178 - DNA, 20 bp, Artificial sequence
  Synthetic oligonucleotide
tatcacttgaacttggaagg

SEQ ID NO: 179 - DNA, 20 bp, Artificial sequence
  Synthetic oligonucleotide
ctatcacttgaacttggaag

SEQ ID NO: 180 - DNA, 20 bp, Artificial sequence
  Synthetic oligonucleotide
tctatcacttgaacttggaa

SEQ ID NO: 181 - DNA, 20 bp, Artificial sequence
  Synthetic oligonucleotide
gtctatcacttgaacttgga

SEQ ID NO: 182 - DNA, 20 bp, Artificial sequence
  Synthetic oligonucleotide
tgtctatcacttgaacttgg

SEQ ID NO: 183 - DNA, 20 bp, Artificial sequence
  Synthetic oligonucleotide
ttgtctatcacttgaacttg

SEQ ID NO: 184 - DNA, 20 bp, Artificial sequence
  Synthetic oligonucleotide
attgtctatcacttgaactt

SEQ ID NO: 185 - DNA, 20 bp, Artificial sequence
  Synthetic oligonucleotide
cattgtctatcacttgaact

SEQ ID NO: 186 - DNA, 20 bp, Artificial sequence
  Synthetic oligonucleotide
ccattgtctatcacttgaac

SEQ ID NO: 187 - DNA, 20 bp, Artificial sequence
  Synthetic oligonucleotide
tccattgtctatcacttgaa

SEQ ID NO: 188 - DNA, 20 bp, Artificial sequence
  Synthetic oligonucleotide
atccattgtctatcacttga

SEQ ID NO: 189 - DNA, 20 bp, Artificial sequence
  Synthetic oligonucleotide
aatccattgtctatcacttg

SEQ ID NO: 190 - DNA, 20 bp, Artificial sequence
  Synthetic oligonucleotide
aaatccattgtctatcactt

SEQ ID NO: 191 - DNA, 20 bp, Artificial sequence
  Synthetic oligonucleotide
caaatccattgtctatcact

SEQ ID NO: 192 - DNA, 20 bp, Artificial sequence
  Synthetic oligonucleotide
ccaaatccattgtctatcac

SEQ ID NO: 193 - DNA, 20 bp, Artificial sequence
  Synthetic oligonucleotide
cccaaatccattgtctatca

SEQ ID NO: 194 - DNA, 20 bp, Artificial sequence
  Synthetic oligonucleotide
tcccaaatccattgtctatc

SEQ ID NO: 195 - DNA, 20 bp, Artificial sequence
  Synthetic oligonucleotide
atcccaaatccattgtctat

SEQ ID NO: 196 - DNA, 20 bp, Artificial sequence
  Synthetic oligonucleotide
catcccaaatccattgtcta

SEQ ID NO: 197 - DNA, 20 bp, Artificial sequence
  Synthetic oligonucleotide
ccatcccaaatccattgtct

SEQ ID NO: 198 - DNA, 20 bp, Artificial sequence
  Synthetic oligonucleotide
cccatcccaaatccattgtc

SEQ ID NO: 199 - DNA, 20 bp, Artificial sequence
  Synthetic oligonucleotide
ccccatcccaaatccattgt

SEQ ID NO: 200 - DNA, 20 bp, Artificial sequence
  Synthetic oligonucleotide
ctccccatcccaaatccatt

SEQ ID NO: 201 - DNA, 20 bp, Artificial sequence
  Synthetic oligonucleotide
actccccatcccaaatccat

SEQ ID NO: 202 - DNA, 20 bp, Artificial sequence
  Synthetic oligonucleotide
cactccccatcccaaatcca

SEQ ID NO: 203 - DNA, 20 bp, Artificial sequence
  Synthetic oligonucleotide
tcactccccatcccaaatcc

SEQ ID NO: 204 - DNA, 20 bp, Artificial sequence
  Synthetic oligonucleotide
atcactccccatcccaaatc

SEQ ID NO: 205 - DNA, 20 bp, Artificial sequence
  Synthetic oligonucleotide
catcactccccatcccaaat

SEQ ID NO: 206 - DNA, 20 bp, Artificial sequence
  Synthetic oligonucleotide
tcatcactccccatcccaaa

SEQ ID NO: 207 - DNA, 20 bp, Artificial sequence
  Synthetic oligonucleotide
atcatcactccccatcccaa

SEQ ID NO: 208 - DNA, 20 bp, Artificial sequence
  Synthetic oligonucleotide
catcatcactccccatccca

SEQ ID NO: 209 - DNA, 20 bp, Artificial sequence
  Synthetic oligonucleotide
acatcatcactccccatccc

SEQ ID NO: 210 - DNA, 20 bp, Artificial sequence
  Synthetic oligonucleotide
tacatcatcactccccatcc

SEQ ID NO: 211 - DNA, 20 bp, Artificial sequence
  Synthetic oligonucleotide
ctacatcatcactccccatc

SEQ ID NO: 212 - DNA, 20 bp, Artificial sequence
  Synthetic oligonucleotide
tctacatcatcactccccat

SEQ ID NO: 213 - DNA, 20 bp, Artificial sequence
  Synthetic oligonucleotide
ctctacatcatcactcccca

SEQ ID NO: 214 - DNA, 20 bp, Artificial sequence
  Synthetic oligonucleotide
tctctacatcatcactcccc

SEQ ID NO: 215 - DNA, 20 bp, Artificial sequence
  Synthetic oligonucleotide
ttctctacatcatcactccc

SEQ ID NO: 216 - DNA, 20 bp, Artificial sequence
  Synthetic oligonucleotide
tttctctacatcatcactcc

SEQ ID NO: 217 - DNA, 20 bp, Artificial sequence
  Synthetic oligonucleotide
ctttctctacatcatcactc

SEQ ID NO: 218 - DNA, 20 bp, Artificial sequence
  Synthetic oligonucleotide
actttctctacatcatcact

SEQ ID NO: 219 - DNA, 20 bp, Artificial sequence
  Synthetic oligonucleotide
cactttctctacatcatcac

SEQ ID NO: 220 - DNA, 20 bp, Artificial sequence
  Synthetic oligonucleotide
ccactttctctacatcatca

SEQ ID NO: 221 - DNA, 20 bp, Artificial sequence
  Synthetic oligonucleotide
cccactttctctacatcatc

SEQ ID NO: 222 - DNA, 20 bp, Artificial sequence
  Synthetic oligonucleotide
tcccactttctctacatcat

SEQ ID NO: 223 - DNA, 20 bp, Artificial sequence
  Synthetic oligonucleotide
ttcccactttctctacatca

SEQ ID NO: 224 - DNA, 20 bp, Artificial sequence
  Synthetic oligonucleotide
tttcccactttctctacatc

SEQ ID NO: 225 - DNA, 20 bp, Artificial sequence
  Synthetic oligonucleotide
atttcccactttctctacat

SEQ ID NO: 226 - DNA, 20 bp, Artificial sequence
  Synthetic oligonucleotide
gatttcccactttctctaca

SEQ ID NO: 227 - DNA, 20 bp, Artificial sequence
  Synthetic oligonucleotide
cgatttcccactttctctac

SEQ ID NO: 228 - DNA, 20 bp, Artificial sequence
  Synthetic oligonucleotide
acgatttcccactttctcta

SEQ ID NO: 229 - DNA, 20 bp, Artificial sequence
  Synthetic oligonucleotide
aacgatttcccactttctct

SEQ ID NO: 230 - DNA, 20 bp, Artificial sequence
  Synthetic oligonucleotide
taacgatttcccactttctc

SEQ ID NO: 231 - DNA, 20 bp, Artificial sequence
  Synthetic oligonucleotide
ataacgatttcccactttct

SEQ ID NO: 232 - DNA, 20 bp, Artificial sequence
  Synthetic oligonucleotide
aataacgatttcccactttc

SEQ ID NO: 233 - DNA, 20 bp, Artificial sequence
  Synthetic oligonucleotide
aaataacgatttcccacttt

SEQ ID NO: 234 - DNA, 20 bp, Artificial sequence
  Synthetic oligonucleotide
tactggtgaaataacgattt

SEQ ID NO: 235 - DNA, 20 bp, Artificial sequence
  Synthetic oligonucleotide
ttactggtgaaataacgatt

SEQ ID NO: 236 - DNA, 20 bp, Artificial sequence
  Synthetic oligonucleotide
tttactggtgaaataacgat

SEQ ID NO: 237 - DNA, 20 bp, Artificial sequence
  Synthetic oligonucleotide
atttactggtgaaataacga

SEQ ID NO: 238 - DNA, 20 bp, Artificial sequence
  Synthetic oligonucleotide
catttactggtgaaataacg

SEQ ID NO: 239 - DNA, 20 bp, Artificial sequence
  Synthetic oligonucleotide
gcatttactggtgaaataac

SEQ ID NO: 240 - DNA, 20 bp, Artificial sequence
  Synthetic oligonucleotide
ggcatttactggtgaaataa

SEQ ID NO: 241 - DNA, 20 bp, Artificial sequence
  Synthetic oligonucleotide
tggcatttactggtgaaata

SEQ ID NO: 242 - DNA, 20 bp, Artificial sequence
  Synthetic oligonucleotide
gtggcatttactggtgaaat

SEQ ID NO: 243 - DNA, 20 bp, Artificial sequence
  Synthetic oligonucleotide
agtggcatttactggtgaaa

SEQ ID NO: 244 - DNA, 20 bp, Artificial sequence
  Synthetic oligonucleotide
gagtggcatttactggtgaa

SEQ ID NO: 245 - DNA, 20 bp, Artificial sequence
  Synthetic oligonucleotide
cgagtggcatttactggtga

SEQ ID NO: 246 - DNA, 20 bp, Artificial sequence
  Synthetic oligonucleotide
ccgagtggcatttactggtg

SEQ ID NO: 247 - DNA, 20 bp, Artificial sequence
  Synthetic oligonucleotide
tccaagtcctgtaccgagtg

SEQ ID NO: 248 - DNA, 20 bp, Artificial sequence
  Synthetic oligonucleotide
ctccaagtcctgtaccgagt

SEQ ID NO: 249 - DNA, 20 bp, Artificial sequence
  Synthetic oligonucleotide
tctccaagtcctgtaccgag

SEQ ID NO: 250 - DNA, 20 bp, Artificial sequence
  Synthetic oligonucleotide
ttctccaagtcctgtaccga

SEQ ID NO: 251 - DNA, 20 bp, Artificial sequence
  Synthetic oligonucleotide
attctccaagtcctgtaccg

SEQ ID NO: 252 - DNA, 20 bp, Artificial sequence
  Synthetic oligonucleotide
gattctccaagtcctgtacc

SEQ ID NO: 253 - DNA, 20 bp, Artificial sequence
  Synthetic oligonucleotide
ggattctccaagtcctgtac

SEQ ID NO: 254 - DNA, 20 bp, Artificial sequence
  Synthetic oligonucleotide
cataaaaccttggattctcc

SEQ ID NO: 255 - DNA, 20 bp, Artificial sequence
  Synthetic oligonucleotide
ccataaaaccttggattctc

SEQ ID NO: 256 - DNA, 20 bp, Artificial sequence
  Synthetic oligonucleotide
accataaaaccttggattct

SEQ ID NO: 257 - DNA, 20 bp, Artificial sequence
  Synthetic oligonucleotide
aaccataaaaccttggattc

SEQ ID NO: 258 - DNA, 20 bp, Artificial sequence
  Synthetic oligonucleotide
aaaccataaaaccttggatt

SEQ ID NO: 259 - DNA, 20 bp, Artificial sequence
  Synthetic oligonucleotide
gaaaccataaaaccttggat

SEQ ID NO: 260 - DNA, 20 bp, Artificial sequence
  Synthetic oligonucleotide
ggaaaccataaaaccttgga

SEQ ID NO: 261 - DNA, 20 bp, Artificial sequence
  Synthetic oligonucleotide
tcggaaaccataaaaccttg

SEQ ID NO: 262 - DNA, 20 bp, Artificial sequence
  Synthetic oligonucleotide
ctcggaaaccataaaacctt

SEQ ID NO: 263 - DNA, 20 bp, Artificial sequence
  Synthetic oligonucleotide
cctcggaaaccataaaacct

SEQ ID NO: 264 - DNA, 20 bp, Artificial sequence
  Synthetic oligonucleotide
tcctcggaaaccataaaacc

SEQ ID NO: 265 - DNA, 20 bp, Artificial sequence
  Synthetic oligonucleotide
ctcctcggaaaccataaaac

SEQ ID NO: 266 - DNA, 20 bp, Artificial sequence
  Synthetic oligonucleotide
tctcctcggaaaccataaaa

SEQ ID NO: 267 - DNA, 20 bp, Artificial sequence
  Synthetic oligonucleotide
ctctcctcggaaaccataaa

SEQ ID NO: 268 - DNA, 20 bp, Artificial sequence
  Synthetic oligonucleotide
cctctcctcggaaaccataa

SEQ ID NO: 269 - DNA, 20 bp, Artificial sequence
  Synthetic oligonucleotide
gcctctcctcggaaaccata

SEQ ID NO: 270 - DNA, 20 bp, Artificial sequence
  Synthetic oligonucleotide
ggccatgtcagcaatatttg

SEQ ID NO: 271 - DNA, 20 bp, Artificial sequence
  Synthetic oligonucleotide
tggccatgtcagcaatattt

SEQ ID NO: 272 - DNA, 20 bp, Artificial sequence
  Synthetic oligonucleotide
ctggccatgtcagcaatatt

SEQ ID NO: 273 - DNA, 20 bp, Artificial sequence
  Synthetic oligonucleotide
actggccatgtcagcaatat

SEQ ID NO: 274 - DNA, 20 bp, Artificial sequence
  Synthetic oligonucleotide
cactggccatgtcagcaata

SEQ ID NO: 275 - DNA, 20 bp, Artificial sequence
  Synthetic oligonucleotide
gcactggccatgtcagcaat

SEQ ID NO: 276 - DNA, 20 bp, Artificial sequence
  Synthetic oligonucleotide
agcactggccatgtcagcaa

SEQ ID NO: 277 - DNA, 20 bp, Artificial sequence
  Synthetic oligonucleotide
cgaaatttccacagcactgg

SEQ ID NO: 278 - DNA, 20 bp, Artificial sequence
  Synthetic oligonucleotide
acgaaatttccacagcactg

SEQ ID NO: 279 - DNA, 20 bp, Artificial sequence
  Synthetic oligonucleotide
gacgaaatttccacagcact

SEQ ID NO: 280 - DNA, 20 bp, Artificial sequence
  Synthetic oligonucleotide
ggacgaaatttccacagcac

SEQ ID NO: 281 - DNA, 20 bp, Artificial sequence
  Synthetic oligonucleotide
tggacgaaatttccacagca

SEQ ID NO: 282 - DNA, 20 bp, Artificial sequence
  Synthetic oligonucleotide
ttttcttggacgaaatttcc

SEQ ID NO: 283 - DNA, 20 bp, Artificial sequence
  Synthetic oligonucleotide
tttttcttggacgaaatttc

SEQ ID NO: 284 - DNA, 20 bp, Artificial sequence
  Synthetic oligonucleotide
gtttttcttggacgaaattt

SEQ ID NO: 285 - DNA, 20 bp, Artificial sequence
  Synthetic oligonucleotide
tgtttttcttggacgaaatt

SEQ ID NO: 286 - DNA, 20 bp, Artificial sequence
  Synthetic oligonucleotide
ctgtttttcttggacgaaat

SEQ ID NO: 287 - DNA, 20 bp, Artificial sequence
  Synthetic oligonucleotide
cctgtttttcttggacgaaa

SEQ ID NO: 288 - DNA, 20 bp, Artificial sequence
  Synthetic oligonucleotide
tcctgtttttcttggacgaa

SEQ ID NO: 289 - DNA, 20 bp, Artificial sequence
  Synthetic oligonucleotide
attgtcctgtttttcttgga

SEQ ID NO: 290 - DNA, 20 bp, Artificial sequence
  Synthetic oligonucleotide
cattgtcctgtttttcttgg

SEQ ID NO: 291 - DNA, 20 bp, Artificial sequence
  Synthetic oligonucleotide
tcattgtcctgtttttcttg

SEQ ID NO: 292 - DNA, 20 bp, Artificial sequence
  Synthetic oligonucleotide
ttcattgtcctgtttttctt

SEQ ID NO: 293 - DNA, 20 bp, Artificial sequence
  Synthetic oligonucleotide
tttcattgtcctgtttttct

SEQ ID NO: 294 - DNA, 20 bp, Artificial sequence
  Synthetic oligonucleotide
ttttcattgtcctgtttttc

SEQ ID NO: 295 - DNA, 20 bp, Artificial sequence
  Synthetic oligonucleotide
gttttcattgtcctgttttt

SEQ ID NO: 296 - DNA, 20 bp, Artificial sequence
  Synthetic oligonucleotide
agttttcattgtcctgtttt

SEQ ID NO: 297 - DNA, 20 bp, Artificial sequence
  Synthetic oligonucleotide
aagttttcattgtcctgttt

SEQ ID NO: 298 - DNA, 20 bp, Artificial sequence
  Synthetic oligonucleotide
aaagttttcattgtcctgtt

SEQ ID NO: 299 - DNA, 20 bp, Artificial sequence
  Synthetic oligonucleotide
aaaagttttcattgtcctgt

SEQ ID NO: 300 - DNA, 20 bp, Artificial sequence
  Synthetic oligonucleotide
caaaagttttcattgtcctg

SEQ ID NO: 301 - DNA, 20 bp, Artificial sequence
  Synthetic oligonucleotide
acaaaagttttcattgtcct

SEQ ID NO: 302 - DNA, 20 bp, Artificial sequence
  Synthetic oligonucleotide
cacaaaagttttcattgtcc

SEQ ID NO: 303 - DNA, 20 bp, Artificial sequence
  Synthetic oligonucleotide
tcacaaaagttttcattgtc

SEQ ID NO: 304 - DNA, 20 bp, Artificial sequence
  Synthetic oligonucleotide
ttcacaaaagttttcattgt

SEQ ID NO: 305 - DNA, 20 bp, Artificial sequence
  Synthetic oligonucleotide
tttcacaaaagttttcattg

SEQ ID NO: 306 - DNA, 20 bp, Artificial sequence
  Synthetic oligonucleotide
gtttcacaaaagttttcatt

SEQ ID NO: 307 - DNA, 20 bp, Artificial sequence
  Synthetic oligonucleotide
agtttcacaaaagttttcat

SEQ ID NO: 308 - DNA, 20 bp, Artificial sequence
  Synthetic oligonucleotide
cagtttcacaaaagttttca

SEQ ID NO: 309 - DNA, 20 bp, Artificial sequence
  Synthetic oligonucleotide
acagtttcacaaaagttttc

SEQ ID NO: 310 - DNA, 20 bp, Artificial sequence
  Synthetic oligonucleotide
aacagtttcacaaaagtttt

SEQ ID NO: 311 - DNA, 20 bp, Artificial sequence
  Synthetic oligonucleotide
aaacagtttcacaaaagttt

SEQ ID NO: 312 - DNA, 20 bp, Artificial sequence
  Synthetic oligonucleotide
tttccactctgaaacagttt

SEQ ID NO: 313 - DNA, 20 bp, Artificial sequence
  Synthetic oligonucleotide
ttttccactctgaaacagtt

SEQ ID NO: 314 - DNA, 20 bp, Artificial sequence
  Synthetic oligonucleotide
cttttccactctgaaacagt

SEQ ID NO: 315 - DNA, 20 bp, Artificial sequence
  Synthetic oligonucleotide
gcttttccactctgaaacag

SEQ ID NO: 316 - DNA, 20 bp, Artificial sequence
  Synthetic oligonucleotide
ggcttttccactctgaaaca

SEQ ID NO: 317 - DNA, 20 bp, Artificial sequence
  Synthetic oligonucleotide
gggcttttccactctgaaac

SEQ ID NO: 318 - DNA, 20 bp, Artificial sequence
  Synthetic oligonucleotide
agggcttttccactctgaaa

SEQ ID NO: 319 - DNA, 20 bp, Artificial sequence
  Synthetic oligonucleotide
cagggcttttccactctgaa

SEQ ID NO: 320 - DNA, 20 bp, Artificial sequence
  Synthetic oligonucleotide
tcagggcttttccactctga

SEQ ID NO: 321 - DNA, 20 bp, Artificial sequence
  Synthetic oligonucleotide
ttcagggcttttccactctg

SEQ ID NO: 322 - DNA, 20 bp, Artificial sequence
  Synthetic oligonucleotide
tttcagggcttttccactct

SEQ ID NO: 323 - DNA, 20 bp, Artificial sequence
  Synthetic oligonucleotide
ctttcagggcttttccactc

SEQ ID NO: 324 - DNA, 20 bp, Artificial sequence
  Synthetic oligonucleotide
gctttcagggcttttccact

SEQ ID NO: 325 - DNA, 20 bp, Artificial sequence
  Synthetic oligonucleotide
agctttcagggcttttccac

SEQ ID NO: 326 - DNA, 20 bp, Artificial sequence
  Synthetic oligonucleotide
agtcacatcagcttcacaag

SEQ ID NO: 327 - DNA, 20 bp, Artificial sequence
  Synthetic oligonucleotide
tagtcacatcagcttcacaa

SEQ ID NO: 328 - DNA, 20 bp, Artificial sequence
  Synthetic oligonucleotide
ctagtcacatcagcttcaca

SEQ ID NO: 329 - DNA, 20 bp, Artificial sequence
  Synthetic oligonucleotide
tctagtcacatcagcttcac

SEQ ID NO: 330 - DNA, 20 bp, Artificial sequence
  Synthetic oligonucleotide
ctctagtcacatcagcttca

SEQ ID NO: 331 - DNA, 20 bp, Artificial sequence
  Synthetic oligonucleotide
gctctagtcacatcagcttc

SEQ ID NO: 332 - DNA, 20 bp, Artificial sequence
  Synthetic oligonucleotide
tgctctagtcacatcagctt

SEQ ID NO: 333 - DNA, 20 bp, Artificial sequence
  Synthetic oligonucleotide
ttgctctagtcacatcagct

SEQ ID NO: 334 - DNA, 20 bp, Artificial sequence
  Synthetic oligonucleotide
cttgctctagtcacatcagc

SEQ ID NO: 335 - DNA, 20 bp, Artificial sequence
  Synthetic oligonucleotide
gcttgctctagtcacatcag

SEQ ID NO: 336 - DNA, 20 bp, Artificial sequence
  Synthetic oligonucleotide
cgcttgctctagtcacatca

SEQ ID NO: 337 - DNA, 20 bp, Artificial sequence
  Synthetic oligonucleotide
gcgcttgctctagtcacatc

SEQ ID NO: 338 - DNA, 20 bp, Artificial sequence
  Synthetic oligonucleotide
tacagtagtcccagcgcttg

SEQ ID NO: 339 - DNA, 20 bp, Artificial sequence
  Synthetic oligonucleotide
ttacagtagtcccagcgctt

SEQ ID NO: 340 - DNA, 20 bp, Artificial sequence
  Synthetic oligonucleotide
gttacagtagtcccagcgct

SEQ ID NO: 341 - DNA, 20 bp, Artificial sequence
  Synthetic oligonucleotide
tgttacagtagtcccagcgc

SEQ ID NO: 342 - DNA, 20 bp, Artificial sequence
  Synthetic oligonucleotide
ctgttacagtagtcccagcg

SEQ ID NO: 343 - DNA, 20 bp, Artificial sequence
  Synthetic oligonucleotide
ataggttatacactgttaca

SEQ ID NO: 344 - DNA, 20 bp, Artificial sequence
  Synthetic oligonucleotide
aataggttatacactgttac

SEQ ID NO: 345 - DNA, 20 bp, Artificial sequence
  Synthetic oligonucleotide
aaataggttatacactgtta

SEQ ID NO: 346 - DNA, 20 bp, Artificial sequence
  Synthetic oligonucleotide
aaaataggttatacactgtt

SEQ ID NO: 347 - DNA, 20 bp, Artificial sequence
  Synthetic oligonucleotide
taaaataggttatacactgt

SEQ ID NO: 348 - DNA, 20 bp, Artificial sequence
  Synthetic oligonucleotide
gtaaaataggttatacactg

SEQ ID NO: 349 - DNA, 20 bp, Artificial sequence
  Synthetic oligonucleotide
ggtaaaataggttatacact

SEQ ID NO: 350 - DNA, 20 bp, Artificial sequence
  Synthetic oligonucleotide
tggtaaaataggttatacac

SEQ ID NO: 351 - DNA, 20 bp, Artificial sequence
  Synthetic oligonucleotide
ctggtaaaataggttataca

SEQ ID NO: 352 - DNA, 20 bp, Artificial sequence
  Synthetic oligonucleotide
gctggtaaaataggttatac

SEQ ID NO: 353 - DNA, 20 bp, Artificial sequence
  Synthetic oligonucleotide
agctggtaaaataggttata

SEQ ID NO: 354 - DNA, 20 bp, Artificial sequence
  Synthetic oligonucleotide
aagctggtaaaataggttat

SEQ ID NO: 355 - DNA, 20 bp, Artificial sequence
  Synthetic oligonucleotide
gaagctggtaaaataggtta

SEQ ID NO: 356 - DNA, 20 bp, Artificial sequence
  Synthetic oligonucleotide
ggaagctggtaaaataggtt

SEQ ID NO: 357 - DNA, 20 bp, Artificial sequence
  Synthetic oligonucleotide
aggaagctggtaaaataggt

SEQ ID NO: 358 - DNA, 20 bp, Artificial sequence
  Synthetic oligonucleotide
caggaagctggtaaaatagg

SEQ ID NO: 359 - DNA, 20 bp, Artificial sequence
  Synthetic oligonucleotide
acaggaagctggtaaaatag

SEQ ID NO: 360 - DNA, 20 bp, Artificial sequence
  Synthetic oligonucleotide
tacaggaagctggtaaaata

SEQ ID NO: 361 - DNA, 20 bp, Artificial sequence
  Synthetic oligonucleotide
ttacaggaagctggtaaaat

SEQ ID NO: 362 - DNA, 20 bp, Artificial sequence
  Synthetic oligonucleotide
cttacaggaagctggtaaaa

SEQ ID NO: 363 - DNA, 20 bp, Artificial sequence
  Synthetic oligonucleotide
ccttacaggaagctggtaaa

SEQ ID NO: 364 - DNA, 20 bp, Artificial sequence
  Synthetic oligonucleotide
atgcatttcctccttacagg

SEQ ID NO: 365 - DNA, 20 bp, Artificial sequence
  Synthetic oligonucleotide
catgcatttcctccttacag

SEQ ID NO: 366 - DNA, 20 bp, Artificial sequence
  Synthetic oligonucleotide
ccatgcatttcctccttaca

SEQ ID NO: 367 - DNA, 20 bp, Artificial sequence
  Synthetic oligonucleotide
tccatgcatttcctccttac

SEQ ID NO: 368 - DNA, 20 bp, Artificial sequence
  Synthetic oligonucleotide
gtccatgcatttcctcctta

SEQ ID NO: 369 - DNA, 20 bp, Artificial sequence
  Synthetic oligonucleotide
ggtccatgcatttcctcctt

SEQ ID NO: 370 - DNA, 20 bp, Artificial sequence
  Synthetic oligonucleotide
gggtccatgcatttcctcct

SEQ ID NO: 371 - DNA, 20 bp, Artificial sequence
  Synthetic oligonucleotide
agggtccatgcatttcctcc

SEQ ID NO: 372 - DNA, 20 bp, Artificial sequence
  Synthetic oligonucleotide
tagggtccatgcatttcctc

SEQ ID NO: 373 - DNA, 20 bp, Artificial sequence
  Synthetic oligonucleotide
ctagggtccatgcatttcct

SEQ ID NO: 374 - DNA, 20 bp, Artificial sequence
  Synthetic oligonucleotide
tctagggtccatgcatttcc

SEQ ID NO: 375 - DNA, 20 bp, Artificial sequence
  Synthetic oligonucleotide
gtctagggtccatgcatttc

SEQ ID NO: 376 - DNA, 20 bp, Artificial sequence
  Synthetic oligonucleotide
agtctagggtccatgcattt

SEQ ID NO: 377 - DNA, 20 bp, Artificial sequence
  Synthetic oligonucleotide
cagtctagggtccatgcatt

SEQ ID NO: 378 - DNA, 20 bp, Artificial sequence
  Synthetic oligonucleotide
ccagtctagggtccatgcat

SEQ ID NO: 379 - DNA, 20 bp, Artificial sequence
  Synthetic oligonucleotide
tccagtctagggtccatgca

SEQ ID NO: 380 - DNA, 20 bp, Artificial sequence
  Synthetic oligonucleotide
actccagtctagggtccatg

SEQ ID NO: 381 - DNA, 20 bp, Artificial sequence
  Synthetic oligonucleotide
aactccagtctagggtccat

SEQ ID NO: 382 - DNA, 20 bp, Artificial sequence
  Synthetic oligonucleotide
aaactccagtctagggtcca

SEQ ID NO: 383 - DNA, 20 bp, Artificial sequence
  Synthetic oligonucleotide
caaactccagtctagggtcc

SEQ ID NO: 384 - DNA, 20 bp, Artificial sequence
  Synthetic oligonucleotide
tcaaactccagtctagggtc

SEQ ID NO: 385 - DNA, 20 bp, Artificial sequence
  Synthetic oligonucleotide
ctcaaactccagtctagggt

SEQ ID NO: 386 - DNA, 20 bp, Artificial sequence
  Synthetic oligonucleotide
tctcaaactccagtctaggg

SEQ ID NO: 387 - DNA, 20 bp, Artificial sequence
  Synthetic oligonucleotide
ttctcaaactccagtctagg

SEQ ID NO: 388 - DNA, 20 bp, Artificial sequence
  Synthetic oligonucleotide
cttctcaaactccagtctag

SEQ ID NO: 389 - DNA, 20 bp, Artificial sequence
  Synthetic oligonucleotide
ccttctcaaactccagtcta

SEQ ID NO: 390 - DNA, 20 bp, Artificial sequence
  Synthetic oligonucleotide
accttctcaaactccagtct

SEQ ID NO: 391 - DNA, 20 bp, Artificial sequence
  Synthetic oligonucleotide
aaccttctcaaactccagtc

SEQ ID NO: 392 - DNA, 20 bp, Artificial sequence
  Synthetic oligonucleotide
taaccttctcaaactccagt

SEQ ID NO: 393 - DNA, 20 bp, Artificial sequence
  Synthetic oligonucleotide
ctaaccttctcaaactccag

SEQ ID NO: 394 - DNA, 20 bp, Artificial sequence
  Synthetic oligonucleotide
cctaaccttctcaaactcca

SEQ ID NO: 395 - DNA, 20 bp, Artificial sequence
  Synthetic oligonucleotide
gcctaaccttctcaaactcc

SEQ ID NO: 396 - DNA, 20 bp, Artificial sequence
  Synthetic oligonucleotide
tgcctaaccttctcaaactc

SEQ ID NO: 397 - DNA, 20 bp, Artificial sequence
  Synthetic oligonucleotide
ctgcctaaccttctcaaact

SEQ ID NO: 398 - DNA, 20 bp, Artificial sequence
  Synthetic oligonucleotide
tctgcctaaccttctcaaac

SEQ ID NO: 399 - DNA, 20 bp, Artificial sequence
  Synthetic oligonucleotide
ctctgcctaaccttctcaaa

SEQ ID NO: 400 - DNA, 20 bp, Artificial sequence
  Synthetic oligonucleotide
tctctgcctaaccttctcaa

SEQ ID NO: 401 - DNA, 20 bp, Artificial sequence
  Synthetic oligonucleotide
ttctctgcctaaccttctca

SEQ ID NO: 402 - DNA, 20 bp, Artificial sequence
  Synthetic oligonucleotide
attctctgcctaaccttctc

SEQ ID NO: 403 - DNA, 20 bp, Artificial sequence
  Synthetic oligonucleotide
tattctctgcctaaccttct

SEQ ID NO: 404 - DNA, 20 bp, Artificial sequence
  Synthetic oligonucleotide
ctattctctgcctaaccttc

SEQ ID NO: 405 - DNA, 20 bp, Artificial sequence
  Synthetic oligonucleotide
tctattctctgcctaacctt

SEQ ID NO: 406 - DNA, 20 bp, Artificial sequence
  Synthetic oligonucleotide
ttctattctctgcctaacct

SEQ ID NO: 407 - DNA, 20 bp, Artificial sequence
  Synthetic oligonucleotide
cttctattctctgcctaacc

SEQ ID NO: 408 - DNA, 20 bp, Artificial sequence
  Synthetic oligonucleotide
gcttctattctctgcctaac

SEQ ID NO: 409 - DNA, 20 bp, Artificial sequence
  Synthetic oligonucleotide
agcttctattctctgcctaa

SEQ ID NO: 410 - DNA, 20 bp, Artificial sequence
  Synthetic oligonucleotide
gagcttctattctctgccta

SEQ ID NO: 411 - DNA, 20 bp, Artificial sequence
  Synthetic oligonucleotide
agagcttctattctctgcct

SEQ ID NO: 412 - DNA, 20 bp, Artificial sequence
  Synthetic oligonucleotide
gagagcttctattctctgcc

SEQ ID NO: 413 - DNA, 20 bp, Artificial sequence
  Synthetic oligonucleotide
agtgagagagcttctattct

SEQ ID NO: 414 - DNA, 20 bp, Artificial sequence
  Synthetic oligonucleotide
gagtgagagagcttctattc

SEQ ID NO: 415 - DNA, 20 bp, Artificial sequence
  Synthetic oligonucleotide
tgagtgagagagcttctatt

SEQ ID NO: 416 - DNA, 20 bp, Artificial sequence
  Synthetic oligonucleotide
atgagtgagagagcttctat

SEQ ID NO: 417 - DNA, 20 bp, Artificial sequence
  Synthetic oligonucleotide
catgagtgagagagcttcta

SEQ ID NO: 418 - DNA, 20 bp, Artificial sequence
  Synthetic oligonucleotide
tgcatgagtgagagagcttc

SEQ ID NO: 419 - DNA, 20 bp, Artificial sequence
  Synthetic oligonucleotide
gtgcatgagtgagagagctt

SEQ ID NO: 420 - DNA, 20 bp, Artificial sequence
  Synthetic oligonucleotide
ggtgcatgagtgagagagct

SEQ ID NO: 421 - DNA, 20 bp, Artificial sequence
  Synthetic oligonucleotide
agggtgcatgagtgagagag

SEQ ID NO: 422 - DNA, 20 bp, Artificial sequence
  Synthetic oligonucleotide
aagggtgcatgagtgagaga

SEQ ID NO: 423 - DNA, 20 bp, Artificial sequence
  Synthetic oligonucleotide
gaagggtgcatgagtgagag

SEQ ID NO: 424 - DNA, 20 bp, Artificial sequence
  Synthetic oligonucleotide
ggaagggtgcatgagtgaga

SEQ ID NO: 425 - DNA, 20 bp, Artificial sequence
  Synthetic oligonucleotide
tggaagggtgcatgagtgag

SEQ ID NO: 426 - DNA, 20 bp, Artificial sequence
  Synthetic oligonucleotide
atggaagggtgcatgagtga

SEQ ID NO: 427 - DNA, 20 bp, Artificial sequence
  Synthetic oligonucleotide
aatggaagggtgcatgagtg

SEQ ID NO: 428 - DNA, 20 bp, Artificial sequence
  Synthetic oligonucleotide
aaatggaagggtgcatgagt

SEQ ID NO: 429 - DNA, 20 bp, Artificial sequence
  Synthetic oligonucleotide
gaaatggaagggtgcatgag

SEQ ID NO: 430 - DNA, 20 bp, Artificial sequence
  Synthetic oligonucleotide
agaaatggaagggtgcatga

SEQ ID NO: 431 - DNA, 20 bp, Artificial sequence
  Synthetic oligonucleotide
aagaaatggaagggtgcatg

SEQ ID NO: 432 - DNA, 20 bp, Artificial sequence
  Synthetic oligonucleotide
aaagaaatggaagggtgcat

SEQ ID NO: 433 - DNA, 20 bp, Artificial sequence
  Synthetic oligonucleotide
gaaagaaatggaagggtgca

SEQ ID NO: 434 - DNA, 20 bp, Artificial sequence
  Synthetic oligonucleotide
agaaagaaatggaagggtgc

SEQ ID NO: 435 - DNA, 20 bp, Artificial sequence
  Synthetic oligonucleotide
gagaaagaaatggaagggtg

SEQ ID NO: 436 - DNA, 20 bp, Artificial sequence
  Synthetic oligonucleotide
agagaaagaaatggaagggt

SEQ ID NO: 437 - DNA, 20 bp, Artificial sequence
  Synthetic oligonucleotide
aagagaaagaaatggaaggg

SEQ ID NO: 438 - DNA, 20 bp, Artificial sequence
  Synthetic oligonucleotide
aaagagaaagaaatggaagg

SEQ ID NO: 439 - DNA, 20 bp, Artificial sequence
  Synthetic oligonucleotide
caaagagaaagaaatggaag

SEQ ID NO: 440 - DNA, 20 bp, Artificial sequence
  Synthetic oligonucleotide
tcaaagagaaagaaatggaa

SEQ ID NO: 441 - DNA, 20 bp, Artificial sequence
  Synthetic oligonucleotide
ctcaaagagaaagaaatgga

SEQ ID NO: 442 - DNA, 20 bp, Artificial sequence
  Synthetic oligonucleotide
tctcaaagagaaagaaatgg

SEQ ID NO: 443 - DNA, 20 bp, Artificial sequence
  Synthetic oligonucleotide
aacatcatttctcaaagaga

SEQ ID NO: 444 - DNA, 20 bp, Artificial sequence
  Synthetic oligonucleotide
aaacatcatttctcaaagag

SEQ ID NO: 445 - DNA, 20 bp, Artificial sequence
  Synthetic oligonucleotide
gaaacatcatttctcaaaga

SEQ ID NO: 446 - DNA, 20 bp, Artificial sequence
  Synthetic oligonucleotide
agaaacatcatttctcaaag

SEQ ID NO: 447 - DNA, 20 bp, Artificial sequence
  Synthetic oligonucleotide
cagaaacatcatttctcaaa

SEQ ID NO: 448 - DNA, 20 bp, Artificial sequence
  Synthetic oligonucleotide
ccagaaacatcatttctcaa

SEQ ID NO: 449 - DNA, 20 bp, Artificial sequence
  Synthetic oligonucleotide
accagaaacatcatttctca

SEQ ID NO: 450 - DNA, 20 bp, Artificial sequence
  Synthetic oligonucleotide
aaccagaaacatcatttctc

SEQ ID NO: 451 - DNA, 20 bp, Artificial sequence
  Synthetic oligonucleotide
ggaaccagaaacatcatttc

SEQ ID NO: 452 - DNA, 20 bp, Artificial sequence
  Synthetic oligonucleotide
tggaaccagaaacatcattt

SEQ ID NO: 453 - DNA, 20 bp, Artificial sequence
  Synthetic oligonucleotide
atggaaccagaaacatcatt

SEQ ID NO: 454 - DNA, 20 bp, Artificial sequence
  Synthetic oligonucleotide
catggaaccagaaacatcat

SEQ ID NO: 455 - DNA, 20 bp, Artificial sequence
  Synthetic oligonucleotide
ccatggaaccagaaacatca

SEQ ID NO: 456 - DNA, 20 bp, Artificial sequence
  Synthetic oligonucleotide
accatggaaccagaaacatc

SEQ ID NO: 457 - DNA, 20 bp, Artificial sequence
  Synthetic oligonucleotide
aaccatggaaccagaaacat

SEQ ID NO: 458 - DNA, 20 bp, Artificial sequence
  Synthetic oligonucleotide
gaaccatggaaccagaaaca

SEQ ID NO: 459 - DNA, 20 bp, Artificial sequence
  Synthetic oligonucleotide
agaaccatggaaccagaaac

SEQ ID NO: 460 - DNA, 20 bp, Artificial sequence
  Synthetic oligonucleotide
aagaaccatggaaccagaaa

SEQ ID NO: 461 - DNA, 20 bp, Artificial sequence
  Synthetic oligonucleotide
gaagaaccatggaaccagaa

SEQ ID NO: 462 - DNA, 20 bp, Artificial sequence
  Synthetic oligonucleotide
tgaagaaccatggaaccaga

SEQ ID NO: 463 - DNA, 20 bp, Artificial sequence
  Synthetic oligonucleotide
ctgaagaaccatggaaccag

SEQ ID NO: 464 - DNA, 20 bp, Artificial sequence
  Synthetic oligonucleotide
gctgaagaaccatggaacca

SEQ ID NO: 465 - DNA, 20 bp, Artificial sequence
  Synthetic oligonucleotide
agctgaagaaccatggaacc

SEQ ID NO: 466 - DNA, 20 bp, Artificial sequence
  Synthetic oligonucleotide
gagctgaagaaccatggaac

SEQ ID NO: 467 - DNA, 20 bp, Artificial sequence
  Synthetic oligonucleotide
ggagctgaagaaccatggaa

SEQ ID NO: 468 - DNA, 20 bp, Artificial sequence
  Synthetic oligonucleotide
gggagctgaagaaccatgga

SEQ ID NO: 469 - DNA, 20 bp, Artificial sequence
  Synthetic oligonucleotide
agggagctgaagaaccatgg

SEQ ID NO: 470 - DNA, 20 bp, Artificial sequence
  Synthetic oligonucleotide
tagggagctgaagaaccatg

SEQ ID NO: 471 - DNA, 20 bp, Artificial sequence
  Synthetic oligonucleotide
ttagggagctgaagaaccat

SEQ ID NO: 472 - DNA, 20 bp, Artificial sequence
  Synthetic oligonucleotide
tttagggagctgaagaacca

SEQ ID NO: 473 - DNA, 20 bp, Artificial sequence
  Synthetic oligonucleotide
ttttagggagctgaagaacc

SEQ ID NO: 474 - DNA, 20 bp, Artificial sequence
  Synthetic oligonucleotide
gttttagggagctgaagaac

SEQ ID NO: 475 - DNA, 20 bp, Artificial sequence
  Synthetic oligonucleotide
ggttttagggagctgaagaa

SEQ ID NO: 476 - DNA, 20 bp, Artificial sequence
  Synthetic oligonucleotide
tggttttagggagctgaaga

SEQ ID NO: 477 - DNA, 20 bp, Artificial sequence
  Synthetic oligonucleotide
ttggttttagggagctgaag

SEQ ID NO: 478 - DNA, 20 bp, Artificial sequence
  Synthetic oligonucleotide
tttggttttagggagctgaa

SEQ ID NO: 479 - DNA, 20 bp, Artificial sequence
  Synthetic oligonucleotide
ctttggttttagggagctga

SEQ ID NO: 480 - DNA, 20 bp, Artificial sequence
  Synthetic oligonucleotide
tctttggttttagggagctg

SEQ ID NO: 481 - DNA, 20 bp, Artificial sequence
  Synthetic oligonucleotide
gtctttggttttagggagct

SEQ ID NO: 482 - DNA, 20 bp, Artificial sequence
  Synthetic oligonucleotide
cgtctttggttttagggagc

SEQ ID NO: 483 - DNA, 20 bp, Artificial sequence
  Synthetic oligonucleotide
acgtctttggttttagggag

SEQ ID NO: 484 - DNA, 20 bp, Artificial sequence
  Synthetic oligonucleotide
tacgtctttggttttaggga

SEQ ID NO: 485 - DNA, 20 bp, Artificial sequence
  Synthetic oligonucleotide
atacgtctttggttttaggg

SEQ ID NO: 486 - DNA, 20 bp, Artificial sequence
  Synthetic oligonucleotide
catacgtctttggttttagg

SEQ ID NO: 487 - DNA, 20 bp, Artificial sequence
  Synthetic oligonucleotide
acatacgtctttggttttag

SEQ ID NO: 488 - DNA, 20 bp, Artificial sequence
  Synthetic oligonucleotide
aacatacgtctttggtttta

SEQ ID NO: 489 - DNA, 20 bp, Artificial sequence
  Synthetic oligonucleotide
gaacatacgtctttggtttt

SEQ ID NO: 490 - DNA, 20 bp, Artificial sequence
  Synthetic oligonucleotide
ggaacatacgtctttggttt

SEQ ID NO: 491 - DNA, 20 bp, Artificial sequence
  Synthetic oligonucleotide
gggaacatacgtctttggtt

SEQ ID NO: 492 - DNA, 20 bp, Artificial sequence
  Synthetic oligonucleotide
cgggaacatacgtctttggt

SEQ ID NO: 493 - DNA, 20 bp, Artificial sequence
  Synthetic oligonucleotide
tcgggaacatacgtctttgg

SEQ ID NO: 494 - DNA, 20 bp, Artificial sequence
  Synthetic oligonucleotide
atcgggaacatacgtctttg

SEQ ID NO: 495 - DNA, 20 bp, Artificial sequence
  Synthetic oligonucleotide
aatcgggaacatacgtcttt

SEQ ID NO: 496 - DNA, 20 bp, Artificial sequence
  Synthetic oligonucleotide
aaatcgggaacatacgtctt

SEQ ID NO: 497 - DNA, 20 bp, Artificial sequence
  Synthetic oligonucleotide
aaaatcgggaacatacgtct

SEQ ID NO: 498 - DNA, 20 bp, Artificial sequence
  Synthetic oligonucleotide
caaaatcgggaacatacgtc

SEQ ID NO: 499 - DNA, 20 bp, Artificial sequence
  Synthetic oligonucleotide
acaaaatcgggaacatacgt

SEQ ID NO: 500 - DNA, 20 bp, Artificial sequence
  Synthetic oligonucleotide
gacaaaatcgggaacatacg

SEQ ID NO: 501 - DNA, 20 bp, Artificial sequence
  Synthetic oligonucleotide
tgacaaaatcgggaacatac

SEQ ID NO: 502 - DNA, 20 bp, Artificial sequence
  Synthetic oligonucleotide
ttgacaaaatcgggaacata

SEQ ID NO: 503 - DNA, 20 bp, Artificial sequence
  Synthetic oligonucleotide
tttgacaaaatcgggaacat

SEQ ID NO: 504 - DNA, 20 bp, Artificial sequence
  Synthetic oligonucleotide
atttgacaaaatcgggaaca

SEQ ID NO: 505 - DNA, 20 bp, Artificial sequence
  Synthetic oligonucleotide
aatttgacaaaatcgggaac

SEQ ID NO: 506 - DNA, 20 bp, Artificial sequence
  Synthetic oligonucleotide
aaatttgacaaaatcgggaa

SEQ ID NO: 507 - DNA, 20 bp, Artificial sequence
  Synthetic oligonucleotide
taaatttgacaaaatcggga

SEQ ID NO: 508 - DNA, 20 bp, Artificial sequence
  Synthetic oligonucleotide
ataaatttgacaaaatcggg

SEQ ID NO: 509 - DNA, 20 bp, Artificial sequence
  Synthetic oligonucleotide
cataaatttgacaaaatcgg

SEQ ID NO: 510 - DNA, 20 bp, Artificial sequence
  Synthetic oligonucleotide
ccataaatttgacaaaatcg

SEQ ID NO: 511 - DNA, 20 bp, Artificial sequence
  Synthetic oligonucleotide
tccataaatttgacaaaatc

SEQ ID NO: 512 - DNA, 20 bp, Artificial sequence
  Synthetic oligonucleotide
caatccataaatttgacaaa

SEQ ID NO: 513 - DNA, 20 bp, Artificial sequence
  Synthetic oligonucleotide
ccaatccataaatttgacaa

SEQ ID NO: 514 - DNA, 20 bp, Artificial sequence
  Synthetic oligonucleotide
cccaatccataaatttgaca

SEQ ID NO: 515 - DNA, 20 bp, Artificial sequence
  Synthetic oligonucleotide
tcccaatccataaatttgac

SEQ ID NO: 516 - DNA, 20 bp, Artificial sequence
  Synthetic oligonucleotide
ttcccaatccataaatttga

SEQ ID NO: 517 - DNA, 20 bp, Artificial sequence
  Synthetic oligonucleotide
tttcccaatccataaatttg

SEQ ID NO: 518 - DNA, 20 bp, Artificial sequence
  Synthetic oligonucleotide
ctttcccaatccataaattt

SEQ ID NO: 519 - DNA, 20 bp, Artificial sequence
  Synthetic oligonucleotide
actttcccaatccataaatt

SEQ ID NO: 520 - DNA, 20 bp, Artificial sequence
  Synthetic oligonucleotide
gactttcccaatccataaat

SEQ ID NO: 521 - DNA, 20 bp, Artificial sequence
  Synthetic oligonucleotide
ggactttcccaatccataaa

SEQ ID NO: 522 - DNA, 20 bp, Artificial sequence
  Synthetic oligonucleotide
cttagcttttgggactttcc

SEQ ID NO: 523 - DNA, 20 bp, Artificial sequence
  Synthetic oligonucleotide
tcttagcttttgggactttc

SEQ ID NO: 524 - DNA, 20 bp, Artificial sequence
  Synthetic oligonucleotide
ctcttagcttttgggacttt

SEQ ID NO: 525 - DNA, 20 bp, Artificial sequence
  Synthetic oligonucleotide
tctcttagcttttgggactt

SEQ ID NO: 526 - DNA, 20 bp, Artificial sequence
  Synthetic oligonucleotide
ttctcttagcttttgggact

SEQ ID NO: 527 - DNA, 20 bp, Artificial sequence
  Synthetic oligonucleotide
tttctcttagcttttgggac

SEQ ID NO: 528 - DNA, 20 bp, Artificial sequence
  Synthetic oligonucleotide
atttctcttagcttttggga

SEQ ID NO: 529 - DNA, 20 bp, Artificial sequence
  Synthetic oligonucleotide
tatttctcttagcttttggg

SEQ ID NO: 530 - DNA, 20 bp, Artificial sequence
  Synthetic oligonucleotide
ttatttctcttagcttttgg

SEQ ID NO: 531 - DNA, 20 bp, Artificial sequence
  Synthetic oligonucleotide
cttatttctcttagcttttg

SEQ ID NO: 532 - DNA, 20 bp, Artificial sequence
  Synthetic oligonucleotide
acttatttctcttagctttt

SEQ ID NO: 533 - DNA, 20 bp, Artificial sequence
  Synthetic oligonucleotide
aacttatttctcttagcttt

SEQ ID NO: 534 - DNA, 20 bp, Artificial sequence
  Synthetic oligonucleotide
aaacttatttctcttagctt

SEQ ID NO: 535 - DNA, 20 bp, Artificial sequence
  Synthetic oligonucleotide
aaaacttatttctcttagct

SEQ ID NO: 536 - DNA, 20 bp, Artificial sequence
  Synthetic oligonucleotide
taaaacttatttctcttagc

SEQ ID NO: 537 - DNA, 20 bp, Artificial sequence
  Synthetic oligonucleotide
gctcaaactctttatattta

SEQ ID NO: 538 - DNA, 20 bp, Artificial sequence
  Synthetic oligonucleotide
agctcaaactctttatattt

SEQ ID NO: 539 - DNA, 20 bp, Artificial sequence
  Synthetic oligonucleotide
aagctcaaactctttatatt

SEQ ID NO: 540 - DNA, 20 bp, Artificial sequence
  Synthetic oligonucleotide
taagctcaaactctttatat

SEQ ID NO: 541 - DNA, 20 bp, Artificial sequence
  Synthetic oligonucleotide
ctaagctcaaactctttata

SEQ ID NO: 542 - DNA, 20 bp, Artificial sequence
  Synthetic oligonucleotide
actaagctcaaactctttat

SEQ ID NO: 543 - DNA, 20 bp, Artificial sequence
  Synthetic oligonucleotide
cactaagctcaaactcttta

SEQ ID NO: 544 - DNA, 20 bp, Artificial sequence
  Synthetic oligonucleotide
ccactaagctcaaactcttt

SEQ ID NO: 545 - DNA, 20 bp, Artificial sequence
  Synthetic oligonucleotide
gccactaagctcaaactctt

SEQ ID NO: 546 - DNA, 20 bp, Artificial sequence
  Synthetic oligonucleotide
agccactaagctcaaactct

SEQ ID NO: 547 - DNA, 20 bp, Artificial sequence
  Synthetic oligonucleotide
tgttgtaatgtgcttcagag

SEQ ID NO: 548 - DNA, 20 bp, Artificial sequence
  Synthetic oligonucleotide
ttgttgtaatgtgcttcaga

SEQ ID NO: 549 - DNA, 20 bp, Artificial sequence
  Synthetic oligonucleotide
cttgttgtaatgtgcttcag

SEQ ID NO: 550 - DNA, 20 bp, Artificial sequence
  Synthetic oligonucleotide
tcttgttgtaatgtgcttca

SEQ ID NO: 551 - DNA, 20 bp, Artificial sequence
  Synthetic oligonucleotide
ttcttgttgtaatgtgcttc

SEQ ID NO: 552 - DNA, 20 bp, Artificial sequence
  Synthetic oligonucleotide
attcttgttgtaatgtgctt

SEQ ID NO: 553 - DNA, 20 bp, Artificial sequence
  Synthetic oligonucleotide
tattcttgttgtaatgtgct

SEQ ID NO: 554 - DNA, 20 bp, Artificial sequence
  Synthetic oligonucleotide
atattcttgttgtaatgtgc

SEQ ID NO: 555 - DNA, 20 bp, Artificial sequence
  Synthetic oligonucleotide
catattcttgttgtaatgtg

SEQ ID NO: 556 - DNA, 20 bp, Artificial sequence
  Synthetic oligonucleotide
gcatattcttgttgtaatgt

SEQ ID NO: 557 - DNA, 20 bp, Artificial sequence
  Synthetic oligonucleotide
tgcatattcttgttgtaatg

SEQ ID NO: 558 - DNA, 20 bp, Artificial sequence
  Synthetic oligonucleotide
ctgcatattcttgttgtaat

SEQ ID NO: 559 - DNA, 20 bp, Artificial sequence
  Synthetic oligonucleotide
actgcatattcttgttgtaa

SEQ ID NO: 560 - DNA, 20 bp, Artificial sequence
  Synthetic oligonucleotide
aactgcatattcttgttgta

SEQ ID NO: 561 - DNA, 20 bp, Artificial sequence
  Synthetic oligonucleotide
aaactgcatattcttgttgt

SEQ ID NO: 562 - DNA, 20 bp, Artificial sequence
  Synthetic oligonucleotide
aaaactgcatattcttgttg

SEQ ID NO: 563 - DNA, 20 bp, Artificial sequence
  Synthetic oligonucleotide
aaaaactgcatattcttgtt

SEQ ID NO: 564 - DNA, 20 bp, Artificial sequence
  Synthetic oligonucleotide
caaaaactgcatattcttgt

SEQ ID NO: 565 - DNA, 20 bp, Artificial sequence
  Synthetic oligonucleotide
acaaaaactgcatattcttg

SEQ ID NO: 566 - DNA, 20 bp, Artificial sequence
  Synthetic oligonucleotide
aacaaaaactgcatattctt

SEQ ID NO: 567 - DNA, 20 bp, Artificial sequence
  Synthetic oligonucleotide
aaacaaaaactgcatattct

SEQ ID NO: 568 - DNA, 20 bp, Artificial sequence
  Synthetic oligonucleotide
caaacaaaaactgcatattc

SEQ ID NO: 569 - DNA, 20 bp, Artificial sequence
  Synthetic oligonucleotide
acaaacaaaaactgcatatt

SEQ ID NO: 570 - DNA, 20 bp, Artificial sequence
  Synthetic oligonucleotide
cacaaacaaaaactgcatat

SEQ ID NO: 571 - DNA, 20 bp, Artificial sequence
  Synthetic oligonucleotide
tcacaaacaaaaactgcata

SEQ ID NO: 572 - DNA, 20 bp, Artificial sequence
  Synthetic oligonucleotide
ttcacaaacaaaaactgcat

SEQ ID NO: 573 - DNA, 20 bp, Artificial sequence
  Synthetic oligonucleotide
gttcacaaacaaaaactgca

SEQ ID NO: 574 - DNA, 20 bp, Artificial sequence
  Synthetic oligonucleotide
aactagtcttttgttcacaa

SEQ ID NO: 575 - DNA, 20 bp, Artificial sequence
  Synthetic oligonucleotide
aaactagtcttttgttcaca

SEQ ID NO: 576 - DNA, 20 bp, Artificial sequence
  Synthetic oligonucleotide
aaaactagtcttttgttcac

SEQ ID NO: 577 - DNA, 20 bp, Artificial sequence
  Synthetic oligonucleotide
taaaactagtcttttgttca

SEQ ID NO: 578 - DNA, 20 bp, Artificial sequence
  Synthetic oligonucleotide
ttaaaactagtcttttgttc

SEQ ID NO: 579 - DNA, 20 bp, Artificial sequence
  Synthetic oligonucleotide
cttaaaactagtcttttgtt

SEQ ID NO: 580 - DNA, 20 bp, Artificial sequence
  Synthetic oligonucleotide
ccttaaaactagtcttttgt

SEQ ID NO: 581 - DNA, 20 bp, Artificial sequence
  Synthetic oligonucleotide
tccttaaaactagtcttttg

SEQ ID NO: 582 - DNA, 20 bp, Artificial sequence
  Synthetic oligonucleotide
gtccttaaaactagtctttt

SEQ ID NO: 583 - DNA, 20 bp, Artificial sequence
  Synthetic oligonucleotide
tgtccttaaaactagtcttt

SEQ ID NO: 584 - DNA, 20 bp, Artificial sequence
  Synthetic oligonucleotide
ttgtccttaaaactagtctt

SEQ ID NO: 585 - DNA, 20 bp, Artificial sequence
  Synthetic oligonucleotide
tttgtccttaaaactagtct

SEQ ID NO: 586 - DNA, 20 bp, Artificial sequence
  Synthetic oligonucleotide
ctttgtccttaaaactagtc

SEQ ID NO: 587 - DNA, 20 bp, Artificial sequence
  Synthetic oligonucleotide
gctttgtccttaaaactagt

SEQ ID NO: 588 - DNA, 20 bp, Artificial sequence
  Synthetic oligonucleotide
agctttgtccttaaaactag

SEQ ID NO: 589 - DNA, 20 bp, Artificial sequence
  Synthetic oligonucleotide
tagctttgtccttaaaacta

SEQ ID NO: 590 - DNA, 20 bp, Artificial sequence
  Synthetic oligonucleotide
gtagctttgtccttaaaact

SEQ ID NO: 591 - DNA, 20 bp, Artificial sequence
  Synthetic oligonucleotide
tgtagctttgtccttaaaac

SEQ ID NO: 592 - DNA, 20 bp, Artificial sequence
  Synthetic oligonucleotide
atgtagctttgtccttaaaa

SEQ ID NO: 593 - DNA, 20 bp, Artificial sequence
  Synthetic oligonucleotide
tatgtagctttgtccttaaa

SEQ ID NO: 594 - DNA, 20 bp, Artificial sequence
  Synthetic oligonucleotide
ttatgtagctttgtccttaa

SEQ ID NO: 595 - DNA, 20 bp, Artificial sequence
  Synthetic oligonucleotide
tttatgtagctttgtcctta

SEQ ID NO: 596 - DNA, 20 bp, Artificial sequence
  Synthetic oligonucleotide
gtttatgtagctttgtcctt

SEQ ID NO: 597 - DNA, 20 bp, Artificial sequence
  Synthetic oligonucleotide
agtttatgtagctttgtcct

SEQ ID NO: 598 - DNA, 20 bp, Artificial sequence
  Synthetic oligonucleotide
gagtttatgtagctttgtcc

SEQ ID NO: 599 - DNA, 20 bp, Artificial sequence
  Synthetic oligonucleotide
tgagtttatgtagctttgtc

SEQ ID NO: 600 - DNA, 20 bp, Artificial sequence
  Synthetic oligonucleotide
atgagtttatgtagctttgt

SEQ ID NO: 601 - DNA, 20 bp, Artificial sequence
  Synthetic oligonucleotide
aatgagtttatgtagctttg

SEQ ID NO: 602 - DNA, 20 bp, Artificial sequence
  Synthetic oligonucleotide
caatgagtttatgtagcttt

SEQ ID NO: 603 - DNA, 20 bp, Artificial sequence
  Synthetic oligonucleotide
tcaatgagtttatgtagctt

SEQ ID NO: 604 - DNA, 20 bp, Artificial sequence
  Synthetic oligonucleotide
gtcaatgagtttatgtagct

SEQ ID NO: 605 - DNA, 20 bp, Artificial sequence
  Synthetic oligonucleotide
agtcaatgagtttatgtagc

SEQ ID NO: 606 - DNA, 20 bp, Artificial sequence
  Synthetic oligonucleotide
aagtcaatgagtttatgtag

SEQ ID NO: 607 - DNA, 20 bp, Artificial sequence
  Synthetic oligonucleotide
aaagtcaatgagtttatgta

SEQ ID NO: 608 - DNA, 20 bp, Artificial sequence
  Synthetic oligonucleotide
aaaagtcaatgagtttatgt

SEQ ID NO: 609 - DNA, 20 bp, Artificial sequence
  Synthetic oligonucleotide
aaaaagtcaatgagtttatg

SEQ ID NO: 610 - DNA, 20 bp, Artificial sequence
  Synthetic oligonucleotide
cttaataaaaagtcaatgag

SEQ ID NO: 611 - DNA, 20 bp, Artificial sequence
  Synthetic oligonucleotide
ccttaataaaaagtcaatga

SEQ ID NO: 612 - DNA, 20 bp, Artificial sequence
  Synthetic oligonucleotide
tccttaataaaaagtcaatg

SEQ ID NO: 613 - DNA, 20 bp, Artificial sequence
  Synthetic oligonucleotide
ctttccttaataaaaagtca

SEQ ID NO: 614 - DNA, 20 bp, Artificial sequence
  Synthetic oligonucleotide
tctttccttaataaaaagtc

SEQ ID NO: 615 - DNA, 20 bp, Artificial sequence
  Synthetic oligonucleotide
catataatactttctttcct

SEQ ID NO: 616 - DNA, 20 bp, Artificial sequence
  Synthetic oligonucleotide
gcatataatactttctttcc

SEQ ID NO: 617 - DNA, 20 bp, Artificial sequence
  Synthetic oligonucleotide
tgcatataatactttctttc

SEQ ID NO: 618 - DNA, 20 bp, Artificial sequence
  Synthetic oligonucleotide
cttgcatataatactttctt

SEQ ID NO: 619 - DNA, 20 bp, Artificial sequence
  Synthetic oligonucleotide
gcttgcatataatactttct

SEQ ID NO: 620 - DNA, 20 bp, Artificial sequence
  Synthetic oligonucleotide
ggcttgcatataatactttc

SEQ ID NO: 621 - DNA, 20 bp, Artificial sequence
  Synthetic oligonucleotide
tggcttgcatataatacttt

SEQ ID NO: 622 - DNA, 20 bp, Artificial sequence
  Synthetic oligonucleotide
ttggcttgcatataatactt

SEQ ID NO: 623 - DNA, 20 bp, Artificial sequence
  Synthetic oligonucleotide
tttggcttgcatataatact

SEQ ID NO: 624 - DNA, 20 bp, Artificial sequence
  Synthetic oligonucleotide
ctttggcttgcatataatac

SEQ ID NO: 625 - DNA, 20 bp, Artificial sequence
  Synthetic oligonucleotide
tctttggcttgcatataata

SEQ ID NO: 626 - DNA, 20 bp, Artificial sequence
  Synthetic oligonucleotide
ttctttggcttgcatataat

SEQ ID NO: 627 - DNA, 20 bp, Artificial sequence
  Synthetic oligonucleotide
attctttggcttgcatataa

SEQ ID NO: 628 - DNA, 20 bp, Artificial sequence
  Synthetic oligonucleotide
cattctttggcttgcatata

SEQ ID NO: 629 - DNA, 20 bp, Artificial sequence
  Synthetic oligonucleotide
ccattctttggcttgcatat

SEQ ID NO: 630 - DNA, 20 bp, Artificial sequence
  Synthetic oligonucleotide
catttgcctactggtgggac

SEQ ID NO: 631 - DNA, 20 bp, Artificial sequence
  Synthetic oligonucleotide
tcatttgcctactggtggga

SEQ ID NO: 632 - DNA, 20 bp, Artificial sequence
  Synthetic oligonucleotide
ttcatttgcctactggtggg

SEQ ID NO: 633 - DNA, 20 bp, Artificial sequence
  Synthetic oligonucleotide
attcatttgcctactggtgg

SEQ ID NO: 634 - DNA, 20 bp, Artificial sequence
  Synthetic oligonucleotide
aattcatttgcctactggtg

SEQ ID NO: 635 - DNA, 20 bp, Artificial sequence
  Synthetic oligonucleotide
gaattcatttgcctactggt

SEQ ID NO: 636 - DNA, 20 bp, Artificial sequence
  Synthetic oligonucleotide
tgaattcatttgcctactgg

SEQ ID NO: 637 - DNA, 20 bp, Artificial sequence
  Synthetic oligonucleotide
ttgaattcatttgcctactg

SEQ ID NO: 638 - DNA, 20 bp, Artificial sequence
  Synthetic oligonucleotide
cttgaattcatttgcctact

SEQ ID NO: 639 - DNA, 20 bp, Artificial sequence
  Synthetic oligonucleotide
acttgaattcatttgcctac

SEQ ID NO: 640 - DNA, 20 bp, Artificial sequence
  Synthetic oligonucleotide
gacttgaattcatttgccta

SEQ ID NO: 641 - DNA, 20 bp, Artificial sequence
  Synthetic oligonucleotide
agacttgaattcatttgcct

SEQ ID NO: 642 - DNA, 20 bp, Artificial sequence
  Synthetic oligonucleotide
aagacttgaattcatttgcc

SEQ ID NO: 643 - DNA, 20 bp, Artificial sequence
  Synthetic oligonucleotide
gaagacttgaattcatttgc

SEQ ID NO: 644 - DNA, 20 bp, Artificial sequence
  Synthetic oligonucleotide
cgaagacttgaattcatttg

SEQ ID NO: 645 - DNA, 20 bp, Artificial sequence
  Synthetic oligonucleotide
ccgaagacttgaattcattt

SEQ ID NO: 646 - DNA, 20 bp, Artificial sequence
  Synthetic oligonucleotide
gccgaagacttgaattcatt

SEQ ID NO: 647 - DNA, 20 bp, Artificial sequence
  Synthetic oligonucleotide
tgccgaagacttgaattcat

SEQ ID NO: 648 - DNA, 20 bp, Artificial sequence
  Synthetic oligonucleotide
gtgccgaagacttgaattca

SEQ ID NO: 649 - DNA, 20 bp, Artificial sequence
  Synthetic oligonucleotide
ggtgccgaagacttgaattc

SEQ ID NO: 650 - DNA, 20 bp, Artificial sequence
  Synthetic oligonucleotide
atatgccatagagttctggg

SEQ ID NO: 651 - DNA, 20 bp, Artificial sequence
  Synthetic oligonucleotide
tatatgccatagagttctgg

SEQ ID NO: 652 - DNA, 20 bp, Artificial sequence
  Synthetic oligonucleotide
atatatgccatagagttctg

SEQ ID NO: 653 - DNA, 20 bp, Artificial sequence
  Synthetic oligonucleotide
catatatgccatagagttct

SEQ ID NO: 654 - DNA, 20 bp, Artificial sequence
  Synthetic oligonucleotide
acatatatgccatagagttc

SEQ ID NO: 655 - DNA, 20 bp, Artificial sequence
  Synthetic oligonucleotide
tacatatatgccatagagtt

SEQ ID NO: 656 - DNA, 20 bp, Artificial sequence
  Synthetic oligonucleotide
ttacatatatgccatagagt

SEQ ID NO: 657 - DNA, 20 bp, Artificial sequence
  Synthetic oligonucleotide
attacatatatgccatagag

SEQ ID NO: 658 - DNA, 20 bp, Artificial sequence
  Synthetic oligonucleotide
aattacatatatgccataga

SEQ ID NO: 659 - DNA, 20 bp, Artificial sequence
  Synthetic oligonucleotide
taattacatatatgccatag

SEQ ID NO: 660 - DNA, 20 bp, Artificial sequence
  Synthetic oligonucleotide
cattaattacatatatgcca

SEQ ID NO: 661 - DNA, 20 bp, Artificial sequence
  Synthetic oligonucleotide
acattaattacatatatgcc

SEQ ID NO: 662 - DNA, 20 bp, Artificial sequence
  Synthetic oligonucleotide
cacattaattacatatatgc

SEQ ID NO: 663 - DNA, 20 bp, Artificial sequence
  Synthetic oligonucleotide
gcacattaattacatatatg

SEQ ID NO: 664 - DNA, 20 bp, Artificial sequence
  Synthetic oligonucleotide
ctgcacattaattacatata

SEQ ID NO: 665 - DNA, 20 bp, Artificial sequence
  Synthetic oligonucleotide
actgcacattaattacatat

SEQ ID NO: 666 - DNA, 20 bp, Artificial sequence
  Synthetic oligonucleotide
cactgcacattaattacata

SEQ ID NO: 667 - DNA, 20 bp, Artificial sequence
  Synthetic oligonucleotide
gcactgcacattaattacat

SEQ ID NO: 668 - DNA, 20 bp, Artificial sequence
  Synthetic oligonucleotide
ggcactgcacattaattaca

SEQ ID NO: 669 - DNA, 20 bp, Artificial sequence
  Synthetic oligonucleotide
tggcactgcacattaattac

SEQ ID NO: 670 - DNA, 20 bp, Artificial sequence
  Synthetic oligonucleotide
ttggcactgcacattaatta

SEQ ID NO: 671 - DNA, 20 bp, Artificial sequence
  Synthetic oligonucleotide
attggcactgcacattaatt

SEQ ID NO: 672 - DNA, 20 bp, Artificial sequence
  Synthetic oligonucleotide
aattggcactgcacattaat

SEQ ID NO: 673 - DNA, 20 bp, Artificial sequence
  Synthetic oligonucleotide
gaattggcactgcacattaa

SEQ ID NO: 674 - DNA, 20 bp, Artificial sequence
  Synthetic oligonucleotide
agaattggcactgcacatta

SEQ ID NO: 675 - DNA, 20 bp, Artificial sequence
  Synthetic oligonucleotide
cagaattggcactgcacatt

SEQ ID NO: 676 - DNA, 20 bp, Artificial sequence
  Synthetic oligonucleotide
acagaattggcactgcacat

SEQ ID NO: 677 - DNA, 20 bp, Artificial sequence
  Synthetic oligonucleotide
cacagaattggcactgcaca

SEQ ID NO: 678 - DNA, 20 bp, Artificial sequence
  Synthetic oligonucleotide
tcacagaattggcactgcac

SEQ ID NO: 679 - DNA, 20 bp, Artificial sequence
  Synthetic oligonucleotide
ctcacagaattggcactgca

SEQ ID NO: 680 - DNA, 20 bp, Artificial sequence
  Synthetic oligonucleotide
actcacagaattggcactgc

SEQ ID NO: 681 - DNA, 20 bp, Artificial sequence
  Synthetic oligonucleotide
atactcacagaattggcact

SEQ ID NO: 682 - DNA, 20 bp, Artificial sequence
  Synthetic oligonucleotide
catactcacagaattggcac

SEQ ID NO: 683 - DNA, 20 bp, Artificial sequence
  Synthetic oligonucleotide
tcatactcacagaattggca

SEQ ID NO: 684 - DNA, 20 bp, Artificial sequence
  Synthetic oligonucleotide
atcatactcacagaattggc

SEQ ID NO: 685 - DNA, 20 bp, Artificial sequence
  Synthetic oligonucleotide
catcatactcacagaattgg

SEQ ID NO: 686 - DNA, 20 bp, Artificial sequence
  Synthetic oligonucleotide
acatcatactcacagaattg

SEQ ID NO: 687 - DNA, 20 bp, Artificial sequence
  Synthetic oligonucleotide
cacatcatactcacagaatt

SEQ ID NO: 688 - DNA, 20 bp, Artificial sequence
  Synthetic oligonucleotide
acacatcatactcacagaat

SEQ ID NO: 689 - DNA, 20 bp, Artificial sequence
  Synthetic oligonucleotide
cacacatcatactcacagaa

SEQ ID NO: 690 - DNA, 20 bp, Artificial sequence
  Synthetic oligonucleotide
gcacacatcatactcacaga

SEQ ID NO: 691 - DNA, 20 bp, Artificial sequence
  Synthetic oligonucleotide
tgcacacatcatactcacag

SEQ ID NO: 692 - DNA, 20 bp, Artificial sequence
  Synthetic oligonucleotide
atgcacacatcatactcaca

SEQ ID NO: 693 - DNA, 20 bp, Artificial sequence
  Synthetic oligonucleotide
catgcacacatcatactcac

SEQ ID NO: 694 - DNA, 20 bp, Artificial sequence
  Synthetic oligonucleotide
ccatgcacacatcatactca

SEQ ID NO: 695 - DNA, 20 bp, Artificial sequence
  Synthetic oligonucleotide
tccatgcacacatcatactc

SEQ ID NO: 696 - DNA, 20 bp, Artificial sequence
  Synthetic oligonucleotide
ctccatgcacacatcatact

SEQ ID NO: 697 - DNA, 20 bp, Artificial sequence
  Synthetic oligonucleotide
gagttttggctggctccatg

SEQ ID NO: 698 - DNA, 20 bp, Artificial sequence
  Synthetic oligonucleotide
agagttttggctggctccat

SEQ ID NO: 699 - DNA, 20 bp, Artificial sequence
  Synthetic oligonucleotide
cagagttttggctggctcca

SEQ ID NO: 700 - DNA, 20 bp, Artificial sequence
  Synthetic oligonucleotide
tcagagttttggctggctcc

SEQ ID NO: 701 - DNA, 20 bp, Artificial sequence
  Synthetic oligonucleotide
atcagagttttggctggctc

SEQ ID NO: 702 - DNA, 20 bp, Artificial sequence
  Synthetic oligonucleotide
aatcagagttttggctggct

SEQ ID NO: 703 - DNA, 20 bp, Artificial sequence
  Synthetic oligonucleotide
caatcagagttttggctggc

SEQ ID NO: 704 - DNA, 20 bp, Artificial sequence
  Synthetic oligonucleotide
tcaatcagagttttggctgg

SEQ ID NO: 705 - DNA, 20 bp, Artificial sequence
  Synthetic oligonucleotide
ttcaatcagagttttggctg

SEQ ID NO: 706 - DNA, 20 bp, Artificial sequence
  Synthetic oligonucleotide
attcaatcagagttttggct

SEQ ID NO: 707 - DNA, 20 bp, Artificial sequence
  Synthetic oligonucleotide
aattcaatcagagttttggc

SEQ ID NO: 708 - DNA, 20 bp, Artificial sequence
  Synthetic oligonucleotide
aaattcaatcagagttttgg

SEQ ID NO: 709 - DNA, 20 bp, Artificial sequence
  Synthetic oligonucleotide
gaaattcaatcagagttttg

SEQ ID NO: 710 - DNA, 20 bp, Artificial sequence
  Synthetic oligonucleotide
tgaaattcaatcagagtttt

SEQ ID NO: 711 - DNA, 20 bp, Artificial sequence
  Synthetic oligonucleotide
ccagttctgaaattcaatca

SEQ ID NO: 712 - DNA, 20 bp, Artificial sequence
  Synthetic oligonucleotide
cccagttctgaaattcaatc

SEQ ID NO: 713 - DNA, 20 bp, Artificial sequence
  Synthetic oligonucleotide
tcccagttctgaaattcaat

SEQ ID NO: 714 - DNA, 20 bp, Artificial sequence
  Synthetic oligonucleotide
gtcccagttctgaaattcaa

SEQ ID NO: 715 - DNA, 20 bp, Artificial sequence
  Synthetic oligonucleotide
tgtcccagttctgaaattca

SEQ ID NO: 716 - DNA, 20 bp, Artificial sequence
  Synthetic oligonucleotide
gtgtcccagttctgaaattc

SEQ ID NO: 717 - DNA, 20 bp, Artificial sequence
  Synthetic oligonucleotide
agtgtcccagttctgaaatt

SEQ ID NO: 718 - DNA, 20 bp, Artificial sequence
  Synthetic oligonucleotide
gagtgtcccagttctgaaat

SEQ ID NO: 719 - DNA, 20 bp, Artificial sequence
  Synthetic oligonucleotide
agagtgtcccagttctgaaa

SEQ ID NO: 720 - DNA, 20 bp, Artificial sequence
  Synthetic oligonucleotide
gagagtgtcccagttctgaa

SEQ ID NO: 721 - DNA, 20 bp, Artificial sequence
  Synthetic oligonucleotide
agagagtgtcccagttctga

SEQ ID NO: 722 - DNA, 20 bp, Artificial sequence
  Synthetic oligonucleotide
aagagagtgtcccagttctg

SEQ ID NO: 723 - DNA, 20 bp, Artificial sequence
  Synthetic oligonucleotide
caagagagtgtcccagttct

SEQ ID NO: 724 - DNA, 20 bp, Artificial sequence
  Synthetic oligonucleotide
acaagagagtgtcccagttc

SEQ ID NO: 725 - DNA, 20 bp, Artificial sequence
  Synthetic oligonucleotide
aacaagagagtgtcccagtt

SEQ ID NO: 726 - DNA, 20 bp, Artificial sequence
  Synthetic oligonucleotide
aaacaagagagtgtcccagt

SEQ ID NO: 727 - DNA, 20 bp, Artificial sequence
  Synthetic oligonucleotide
aaaacaagagagtgtcccag

SEQ ID NO: 728 - DNA, 20 bp, Artificial sequence
  Synthetic oligonucleotide
caaaacaagagagtgtccca

SEQ ID NO: 729 - DNA, 20 bp, Artificial sequence
  Synthetic oligonucleotide
gcaaaacaagagagtgtccc

SEQ ID NO: 730 - DNA, 20 bp, Artificial sequence
  Synthetic oligonucleotide
tgcaaaacaagagagtgtcc

SEQ ID NO: 731 - DNA, 20 bp, Artificial sequence
  Synthetic oligonucleotide
atgcaaaacaagagagtgtc

SEQ ID NO: 732 - DNA, 20 bp, Artificial sequence
  Synthetic oligonucleotide
aatgcaaaacaagagagtgt

SEQ ID NO: 733 - DNA, 20 bp, Artificial sequence
  Synthetic oligonucleotide
gaatgcaaaacaagagagtg

SEQ ID NO: 734 - DNA, 20 bp, Artificial sequence
  Synthetic oligonucleotide
tgaatgcaaaacaagagagt

SEQ ID NO: 735 - DNA, 20 bp, Artificial sequence
  Synthetic oligonucleotide
ctgaatgcaaaacaagagag

SEQ ID NO: 736 - DNA, 20 bp, Artificial sequence
  Synthetic oligonucleotide
cctgaatgcaaaacaagaga

SEQ ID NO: 737 - DNA, 20 bp, Artificial sequence
  Synthetic oligonucleotide
tcctgaatgcaaaacaagag

SEQ ID NO: 738 - DNA, 20 bp, Artificial sequence
  Synthetic oligonucleotide
ttcctgaatgcaaaacaaga

SEQ ID NO: 739 - DNA, 20 bp, Artificial sequence
  Synthetic oligonucleotide
cttcctgaatgcaaaacaag

SEQ ID NO: 740 - DNA, 20 bp, Artificial sequence
  Synthetic oligonucleotide
ccttcctgaatgcaaaacaa

SEQ ID NO: 741 - DNA, 20 bp, Artificial sequence
  Synthetic oligonucleotide
tccttcctgaatgcaaaaca

SEQ ID NO: 742 - DNA, 20 bp, Artificial sequence
  Synthetic oligonucleotide
ctccttcctgaatgcaaaac

SEQ ID NO: 743 - DNA, 20 bp, Artificial sequence
  Synthetic oligonucleotide
actccttcctgaatgcaaaa

SEQ ID NO: 744 - DNA, 20 bp, Artificial sequence
  Synthetic oligonucleotide
cactccttcctgaatgcaaa

SEQ ID NO: 745 - DNA, 20 bp, Artificial sequence
  Synthetic oligonucleotide
tcactccttcctgaatgcaa

SEQ ID NO: 746 - DNA, 20 bp, Artificial sequence
  Synthetic oligonucleotide
ttcactccttcctgaatgca

SEQ ID NO: 747 - DNA, 20 bp, Artificial sequence
  Synthetic oligonucleotide
tttcactccttcctgaatgc

SEQ ID NO: 748 - DNA, 20 bp, Artificial sequence
  Synthetic oligonucleotide
ttttcactccttcctgaatg

SEQ ID NO: 749 - DNA, 20 bp, Artificial sequence
  Synthetic oligonucleotide
attttcactccttcctgaat

SEQ ID NO: 750 - DNA, 20 bp, Artificial sequence
  Synthetic oligonucleotide
cattttcactccttcctgaa

SEQ ID NO: 751 - DNA, 20 bp, Artificial sequence
  Synthetic oligonucleotide
acattttcactccttcctga

SEQ ID NO: 752 - DNA, 20 bp, Artificial sequence
  Synthetic oligonucleotide
aacattttcactccttcctg

SEQ ID NO: 753 - DNA, 20 bp, Artificial sequence
  Synthetic oligonucleotide
aaacattttcactccttcct

SEQ ID NO: 754 - DNA, 20 bp, Artificial sequence
  Synthetic oligonucleotide
aaaacattttcactccttcc

SEQ ID NO: 755 - DNA, 20 bp, Artificial sequence
  Synthetic oligonucleotide
aaaaacattttcactccttc

SEQ ID NO: 756 - DNA, 20 bp, Artificial sequence
  Synthetic oligonucleotide
taaaaacattttcactcctt

SEQ ID NO: 757 - DNA, 20 bp, Artificial sequence
  Synthetic oligonucleotide
ttaaaaacattttcactcct

SEQ ID NO: 758 - DNA, 20 bp, Artificial sequence
  Synthetic oligonucleotide
tttaaaaacattttcactcc

SEQ ID NO: 759 - DNA, 20 bp, Artificial sequence
  Synthetic oligonucleotide
ctttaaaaacattttcactc

SEQ ID NO: 760 - DNA, 20 bp, Artificial sequence
  Synthetic oligonucleotide
gctttaaaaacattttcact

SEQ ID NO: 761 - DNA, 20 bp, Artificial sequence
  Synthetic oligonucleotide
tgctttaaaaacattttcac

SEQ ID NO: 762 - DNA, 20 bp, Artificial sequence
  Synthetic oligonucleotide
cttgctttaaaaacattttc

SEQ ID NO: 763 - DNA, 20 bp, Artificial sequence
  Synthetic oligonucleotide
cacaaataatttttcttgct

SEQ ID NO: 764 - DNA, 20 bp, Artificial sequence
  Synthetic oligonucleotide
ccacaaataatttttcttgc

SEQ ID NO: 765 - DNA, 20 bp, Artificial sequence
  Synthetic oligonucleotide
tccacaaataatttttcttg

SEQ ID NO: 766 - DNA, 20 bp, Artificial sequence
  Synthetic oligonucleotide
ctgataattccacaaataat

SEQ ID NO: 767 - DNA, 20 bp, Artificial sequence
  Synthetic oligonucleotide
cctgataattccacaaataa

SEQ ID NO: 768 - DNA, 20 bp, Artificial sequence
  Synthetic oligonucleotide
acctgataattccacaaata

SEQ ID NO: 769 - DNA, 20 bp, Artificial sequence
  Synthetic oligonucleotide
cacctgataattccacaaat

SEQ ID NO: 770 - DNA, 20 bp, Artificial sequence
  Synthetic oligonucleotide
tcacctgataattccacaaa

SEQ ID NO: 771 - DNA, 20 bp, Artificial sequence
  Synthetic oligonucleotide
ctcacctgataattccacaa

SEQ ID NO: 772 - DNA, 20 bp, Artificial sequence
  Synthetic oligonucleotide
cctcacctgataattccaca

SEQ ID NO: 773 - DNA, 20 bp, Artificial sequence
  Synthetic oligonucleotide
tcctcacctgataattccac

SEQ ID NO: 774 - DNA, 20 bp, Artificial sequence
  Synthetic oligonucleotide
atcctcacctgataattcca

SEQ ID NO: 775 - DNA, 20 bp, Artificial sequence
  Synthetic oligonucleotide
tatcctcacctgataattcc

SEQ ID NO: 776 - DNA, 20 bp, Artificial sequence
  Synthetic oligonucleotide
atatcctcacctgataattc

SEQ ID NO: 777 - DNA, 20 bp, Artificial sequence
  Synthetic oligonucleotide
aatatcctcacctgataatt

SEQ ID NO: 778 - DNA, 20 bp, Artificial sequence
  Synthetic oligonucleotide
taatatcctcacctgataat

SEQ ID NO: 779 - DNA, 20 bp, Artificial sequence
  Synthetic oligonucleotide
ttaatatcctcacctgataa

SEQ ID NO: 780 - DNA, 20 bp, Artificial sequence
  Synthetic oligonucleotide
cttaatatcctcacctgata

SEQ ID NO: 781 - DNA, 20 bp, Artificial sequence
  Synthetic oligonucleotide
ccttaatatcctcacctgat

SEQ ID NO: 782 - DNA, 20 bp, Artificial sequence
  Synthetic oligonucleotide
tccttaatatcctcacctga

SEQ ID NO: 783 - DNA, 20 bp, Artificial sequence
  Synthetic oligonucleotide
ttccttaatatcctcacctg

SEQ ID NO: 784 - DNA, 20 bp, Artificial sequence
  Synthetic oligonucleotide
attccttaatatcctcacct

SEQ ID NO: 785 - DNA, 20 bp, Artificial sequence
  Synthetic oligonucleotide
aattccttaatatcctcacc

SEQ ID NO: 786 - DNA, 20 bp, Artificial sequence
  Synthetic oligonucleotide
aaattccttaatatcctcac

SEQ ID NO: 787 - DNA, 20 bp, Artificial sequence
  Synthetic oligonucleotide
taaattccttaatatcctca

SEQ ID NO: 788 - DNA, 20 bp, Artificial sequence
  Synthetic oligonucleotide
ctaaattccttaatatcctc

SEQ ID NO: 789 - DNA, 20 bp, Artificial sequence
  Synthetic oligonucleotide
actaaattccttaatatcct

SEQ ID NO: 790 - DNA, 20 bp, Artificial sequence
  Synthetic oligonucleotide
cactaaattccttaatatcc

SEQ ID NO: 791 - DNA, 20 bp, Artificial sequence
  Synthetic oligonucleotide
tcactaaattccttaatatc

SEQ ID NO: 792 - DNA, 20 bp, Artificial sequence
  Synthetic oligonucleotide
cttcactaaattccttaata

SEQ ID NO: 793 - DNA, 20 bp, Artificial sequence
  Synthetic oligonucleotide
tcttcactaaattccttaat

SEQ ID NO: 794 - DNA, 20 bp, Artificial sequence
  Synthetic oligonucleotide
atcttcactaaattccttaa

SEQ ID NO: 795 - DNA, 20 bp, Artificial sequence
  Synthetic oligonucleotide
tatcttcactaaattcctta

SEQ ID NO: 796 - DNA, 20 bp, Artificial sequence
  Synthetic oligonucleotide
ttatcttcactaaattcctt

SEQ ID NO: 797 - DNA, 20 bp, Artificial sequence
  Synthetic oligonucleotide
attatcttcactaaattcct

SEQ ID NO: 798 - DNA, 20 bp, Artificial sequence
  Synthetic oligonucleotide
cattatcttcactaaattcc

SEQ ID NO: 799 - DNA, 20 bp, Artificial sequence
  Synthetic oligonucleotide
ccattatcttcactaaattc

SEQ ID NO: 800 - DNA, 20 bp, Artificial sequence
  Synthetic oligonucleotide
accattatcttcactaaatt

SEQ ID NO: 801 - DNA, 20 bp, Artificial sequence
  Synthetic oligonucleotide
aaccattatcttcactaaat

SEQ ID NO: 802 - DNA, 20 bp, Artificial sequence
  Synthetic oligonucleotide
aaaccattatcttcactaaa

SEQ ID NO: 803 - DNA, 20 bp, Artificial sequence
  Synthetic oligonucleotide
aaaaccattatcttcactaa

SEQ ID NO: 804 - DNA, 20 bp, Artificial sequence
  Synthetic oligonucleotide
taaaaccattatcttcacta

SEQ ID NO: 805 - DNA, 20 bp, Artificial sequence
  Synthetic oligonucleotide
ctaaaaccattatcttcact

SEQ ID NO: 806 - DNA, 20 bp, Artificial sequence
  Synthetic oligonucleotide
actaaaaccattatcttcac

SEQ ID NO: 807 - DNA, 20 bp, Artificial sequence
  Synthetic oligonucleotide
aactaaaaccattatcttca

SEQ ID NO: 808 - DNA, 20 bp, Artificial sequence
  Synthetic oligonucleotide
aaactaaaaccattatcttc

SEQ ID NO: 809 - DNA, 20 bp, Artificial sequence
  Synthetic oligonucleotide
catcaaataaactaaaacca

SEQ ID NO: 810 - DNA, 20 bp, Artificial sequence
  Synthetic oligonucleotide
gcatcaaataaactaaaacc

SEQ ID NO: 811 - DNA, 20 bp, Artificial sequence
  Synthetic oligonucleotide
agcatcaaataaactaaaac

SEQ ID NO: 812 - DNA, 20 bp, Artificial sequence
  Synthetic oligonucleotide
gtagcatcaaataaactaaa

SEQ ID NO: 813 - DNA, 20 bp, Artificial sequence
  Synthetic oligonucleotide
agtagcatcaaataaactaa

SEQ ID NO: 814 - DNA, 20 bp, Artificial sequence
  Synthetic oligonucleotide
gagtagcatcaaataaacta

SEQ ID NO: 815 - DNA, 20 bp, Artificial sequence
  Synthetic oligonucleotide
agagtagcatcaaataaact

SEQ ID NO: 816 - DNA, 20 bp, Artificial sequence
  Synthetic oligonucleotide
aagagtagcatcaaataaac

SEQ ID NO: 817 - DNA, 20 bp, Artificial sequence
  Synthetic oligonucleotide
gaagagtagcatcaaataaa

SEQ ID NO: 818 - DNA, 20 bp, Artificial sequence
  Synthetic oligonucleotide
tgaagagtagcatcaaataa

SEQ ID NO: 819 - DNA, 20 bp, Artificial sequence
  Synthetic oligonucleotide
ctgaagagtagcatcaaata

SEQ ID NO: 820 - DNA, 20 bp, Artificial sequence
  Synthetic oligonucleotide
tctgaagagtagcatcaaat

SEQ ID NO: 821 - DNA, 20 bp, Artificial sequence
  Synthetic oligonucleotide
ttctgaagagtagcatcaaa

SEQ ID NO: 822 - DNA, 20 bp, Artificial sequence
  Synthetic oligonucleotide
cttctgaagagtagcatcaa

SEQ ID NO: 823 - DNA, 20 bp, Artificial sequence
  Synthetic oligonucleotide
acacgcttctgaagagtagc

SEQ ID NO: 824 - DNA, 20 bp, Artificial sequence
  Synthetic oligonucleotide
cacacgcttctgaagagtag

SEQ ID NO: 825 - DNA, 20 bp, Artificial sequence
  Synthetic oligonucleotide
tcacacgcttctgaagagta

SEQ ID NO: 826 - DNA, 20 bp, Artificial sequence
  Synthetic oligonucleotide
agtcacacgcttctgaagag

SEQ ID NO: 827 - DNA, 20 bp, Artificial sequence
  Synthetic oligonucleotide
aagtcacacgcttctgaaga

SEQ ID NO: 828 - DNA, 20 bp, Artificial sequence
  Synthetic oligonucleotide
tcatcggaagtcacacgctt

SEQ ID NO: 829 - DNA, 20 bp, Artificial sequence
  Synthetic oligonucleotide
ctcatcggaagtcacacgct

SEQ ID NO: 830 - DNA, 20 bp, Artificial sequence
  Synthetic oligonucleotide
tctcatcggaagtcacacgc

SEQ ID NO: 831 - DNA, 20 bp, Artificial sequence
  Synthetic oligonucleotide
ctctcatcggaagtcacacg

SEQ ID NO: 832 - DNA, 20 bp, Artificial sequence
  Synthetic oligonucleotide
cctctcatcggaagtcacac

SEQ ID NO: 833 - DNA, 20 bp, Artificial sequence
  Synthetic oligonucleotide
tcctctcatcggaagtcaca

SEQ ID NO: 834 - DNA, 20 bp, Artificial sequence
  Synthetic oligonucleotide
ctcctctcatcggaagtcac

SEQ ID NO: 835 - DNA, 20 bp, Artificial sequence
  Synthetic oligonucleotide
gctcctctcatcggaagtca

SEQ ID NO: 836 - DNA, 20 bp, Artificial sequence
  Synthetic oligonucleotide
tgctcctctcatcggaagtc

SEQ ID NO: 837 - DNA, 20 bp, Artificial sequence
  Synthetic oligonucleotide
ttgctcctctcatcggaagt

SEQ ID NO: 838 - DNA, 20 bp, Artificial sequence
  Synthetic oligonucleotide
attgctcctctcatcggaag

SEQ ID NO: 839 - DNA, 20 bp, Artificial sequence
  Synthetic oligonucleotide
aattgctcctctcatcggaa

SEQ ID NO: 840 - DNA, 20 bp, Artificial sequence
  Synthetic oligonucleotide
aaattgctcctctcatcgga

SEQ ID NO: 841 - DNA, 20 bp, Artificial sequence
  Synthetic oligonucleotide
gaaattgctcctctcatcgg

SEQ ID NO: 842 - DNA, 20 bp, Artificial sequence
  Synthetic oligonucleotide
ggaaattgctcctctcatcg

SEQ ID NO: 843 - DNA, 20 bp, Artificial sequence
  Synthetic oligonucleotide
tggaaattgctcctctcatc

SEQ ID NO: 844 - DNA, 20 bp, Artificial sequence
  Synthetic oligonucleotide
ctggaaattgctcctctcat

SEQ ID NO: 845 - DNA, 20 bp, Artificial sequence
  Synthetic oligonucleotide
cctggaaattgctcctctca

SEQ ID NO: 846 - DNA, 20 bp, Artificial sequence
  Synthetic oligonucleotide
tcctggaaattgctcctctc

SEQ ID NO: 847 - DNA, 20 bp, Artificial sequence
  Synthetic oligonucleotide
ttcctggaaattgctcctct

SEQ ID NO: 848 - DNA, 20 bp, Artificial sequence
  Synthetic oligonucleotide
cttcctggaaattgctcctc

SEQ ID NO: 849 - DNA, 20 bp, Artificial sequence
  Synthetic oligonucleotide
gcttcctggaaattgctcct

SEQ ID NO: 850 - DNA, 20 bp, Artificial sequence
  Synthetic oligonucleotide
tgcttcctggaaattgctcc

SEQ ID NO: 851 - DNA, 20 bp, Artificial sequence
  Synthetic oligonucleotide
atgcttcctggaaattgctc

SEQ ID NO: 852 - DNA, 20 bp, Artificial sequence
  Synthetic oligonucleotide
catgcttcctggaaattgct

SEQ ID NO: 853 - DNA, 20 bp, Artificial sequence
  Synthetic oligonucleotide
acatgcttcctggaaattgc

SEQ ID NO: 854 - DNA, 20 bp, Artificial sequence
  Synthetic oligonucleotide
tacatgcttcctggaaattg

SEQ ID NO: 855 - DNA, 20 bp, Artificial sequence
  Synthetic oligonucleotide
ttacatgcttcctggaaatt

SEQ ID NO: 856 - DNA, 20 bp, Artificial sequence
  Synthetic oligonucleotide
attacatgcttcctggaaat

SEQ ID NO: 857 - DNA, 20 bp, Artificial sequence
  Synthetic oligonucleotide
tattacatgcttcctggaaa

SEQ ID NO: 858 - DNA, 20 bp, Artificial sequence
  Synthetic oligonucleotide
ttattacatgcttcctggaa

SEQ ID NO: 859 - DNA, 20 bp, Artificial sequence
  Synthetic oligonucleotide
attattacatgcttcctgga

SEQ ID NO: 860 - DNA, 20 bp, Artificial sequence
  Synthetic oligonucleotide
tattattacatgcttcctgg

SEQ ID NO: 861 - DNA, 20 bp, Artificial sequence
  Synthetic oligonucleotide
atattattacatgcttcctg

SEQ ID NO: 862 - DNA, 20 bp, Artificial sequence
  Synthetic oligonucleotide
aatattattacatgcttcct

SEQ ID NO: 863 - DNA, 20 bp, Artificial sequence
  Synthetic oligonucleotide
aaatattattacatgcttcc

SEQ ID NO: 864 - DNA, 20 bp, Artificial sequence
  Synthetic oligonucleotide
ctcataggaatctaaaatat

SEQ ID NO: 865 - DNA, 20 bp, Artificial sequence
  Synthetic oligonucleotide
tctcataggaatctaaaata

SEQ ID NO: 866 - DNA, 20 bp, Artificial sequence
  Synthetic oligonucleotide
atctcataggaatctaaaat

SEQ ID NO: 867 - DNA, 20 bp, Artificial sequence
  Synthetic oligonucleotide
catctcataggaatctaaaa

SEQ ID NO: 868 - DNA, 20 bp, Artificial sequence
  Synthetic oligonucleotide
acatctcataggaatctaaa

SEQ ID NO: 869 - DNA, 20 bp, Artificial sequence
  Synthetic oligonucleotide
aacatctcataggaatctaa

SEQ ID NO: 870 - DNA, 20 bp, Artificial sequence
  Synthetic oligonucleotide
aaacatctcataggaatcta

SEQ ID NO: 871 - DNA, 20 bp, Artificial sequence
  Synthetic oligonucleotide
taaacatctcataggaatct

SEQ ID NO: 872 - DNA, 20 bp, Artificial sequence
  Synthetic oligonucleotide
ttaaacatctcataggaatc

SEQ ID NO: 873 - DNA, 20 bp, Artificial sequence
  Synthetic oligonucleotide
attaaacatctcataggaat

SEQ ID NO: 874 - DNA, 20 bp, Artificial sequence
  Synthetic oligonucleotide
aattaaacatctcataggaa

SEQ ID NO: 875 - DNA, 20 bp, Artificial sequence
  Synthetic oligonucleotide
aaattaaacatctcatagga

SEQ ID NO: 876 - DNA, 20 bp, Artificial sequence
  Synthetic oligonucleotide
caaattaaacatctcatagg

SEQ ID NO: 877 - DNA, 20 bp, Artificial sequence
  Synthetic oligonucleotide
gcaaattaaacatctcatag

SEQ ID NO: 878 - DNA, 20 bp, Artificial sequence
  Synthetic oligonucleotide
tgcaaattaaacatctcata

SEQ ID NO: 879 - DNA, 20 bp, Artificial sequence
  Synthetic oligonucleotide
ctgcaaattaaacatctcat

SEQ ID NO: 880 - DNA, 20 bp, Artificial sequence
  Synthetic oligonucleotide
actgcaaattaaacatctca

SEQ ID NO: 881 - DNA, 20 bp, Artificial sequence
  Synthetic oligonucleotide
gactgcaaattaaacatctc

SEQ ID NO: 882 - DNA, 20 bp, Artificial sequence
  Synthetic oligonucleotide
tgactgcaaattaaacatct

SEQ ID NO: 883 - DNA, 20 bp, Artificial sequence
  Synthetic oligonucleotide
ttgactgcaaattaaacatc

SEQ ID NO: 884 - DNA, 20 bp, Artificial sequence
  Synthetic oligonucleotide
tttgactgcaaattaaacat

SEQ ID NO: 885 - DNA, 20 bp, Artificial sequence
  Synthetic oligonucleotide
tcttttcacagcttttgact

SEQ ID NO: 886 - DNA, 20 bp, Artificial sequence
  Synthetic oligonucleotide
ttcttttcacagcttttgac

SEQ ID NO: 887 - DNA, 20 bp, Artificial sequence
  Synthetic oligonucleotide
tttcttttcacagcttttga

SEQ ID NO: 888 - DNA, 20 bp, Artificial sequence
  Synthetic oligonucleotide
ttttcttttcacagcttttg

SEQ ID NO: 889 - DNA, 20 bp, Artificial sequence
  Synthetic oligonucleotide
tttttcttttcacagctttt

SEQ ID NO: 890 - DNA, 20 bp, Artificial sequence
  Synthetic oligonucleotide
gtttttcttttcacagcttt

SEQ ID NO: 891 - DNA, 20 bp, Artificial sequence
  Synthetic oligonucleotide
agtttttcttttcacagctt

SEQ ID NO: 892 - DNA, 20 bp, Artificial sequence
  Synthetic oligonucleotide
tagtttttcttttcacagct

SEQ ID NO: 893 - DNA, 20 bp, Artificial sequence
  Synthetic oligonucleotide
gtagtttttcttttcacagc

SEQ ID NO: 894 - DNA, 20 bp, Artificial sequence
  Synthetic oligonucleotide
agtagtttttcttttcacag

SEQ ID NO: 895 - DNA, 20 bp, Artificial sequence
  Synthetic oligonucleotide
cagtagtttttcttttcaca

SEQ ID NO: 896 - DNA, 20 bp, Artificial sequence
  Synthetic oligonucleotide
gcagtagtttttcttttcac

SEQ ID NO: 897 - DNA, 20 bp, Artificial sequence
  Synthetic oligonucleotide
tgcagtagtttttcttttca

SEQ ID NO: 898 - DNA, 20 bp, Artificial sequence
  Synthetic oligonucleotide
ctgcagtagtttttcttttc

SEQ ID NO: 899 - DNA, 20 bp, Artificial sequence
  Synthetic oligonucleotide
tctgcagtagtttttctttt

SEQ ID NO: 900 - DNA, 20 bp, Artificial sequence
  Synthetic oligonucleotide
ttctgcagtagtttttcttt

SEQ ID NO: 901 - DNA, 20 bp, Artificial sequence
  Synthetic oligonucleotide
tttctgcagtagtttttctt

SEQ ID NO: 902 - DNA, 20 bp, Artificial sequence
  Synthetic oligonucleotide
ttttctgcagtagtttttct

SEQ ID NO: 903 - DNA, 20 bp, Artificial sequence
  Synthetic oligonucleotide
gttttctgcagtagtttttc

SEQ ID NO: 904 - DNA, 20 bp, Artificial sequence
  Synthetic oligonucleotide
cgttttctgcagtagttttt

SEQ ID NO: 905 - DNA, 20 bp, Artificial sequence
  Synthetic oligonucleotide
acgttttctgcagtagtttt

SEQ ID NO: 906 - DNA, 20 bp, Artificial sequence
  Synthetic oligonucleotide
tacgttttctgcagtagttt

SEQ ID NO: 907 - DNA, 20 bp, Artificial sequence
  Synthetic oligonucleotide
ttacgttttctgcagtagtt

SEQ ID NO: 908 - DNA, 20 bp, Artificial sequence
  Synthetic oligonucleotide
tttacgttttctgcagtagt

SEQ ID NO: 909 - DNA, 20 bp, Artificial sequence
  Synthetic oligonucleotide
gtttacgttttctgcagtag

SEQ ID NO: 910 - DNA, 20 bp, Artificial sequence
  Synthetic oligonucleotide
tgtttacgttttctgcagta

SEQ ID NO: 911 - DNA, 20 bp, Artificial sequence
  Synthetic oligonucleotide
gtgtttacgttttctgcagt

SEQ ID NO: 912 - DNA, 20 bp, Artificial sequence
  Synthetic oligonucleotide
tgtgtttacgttttctgcag

SEQ ID NO: 913 - DNA, 20 bp, Artificial sequence
  Synthetic oligonucleotide
gtgtgtttacgttttctgca

SEQ ID NO: 914 - DNA, 20 bp, Artificial sequence
  Synthetic oligonucleotide
tgtgtgtttacgttttctgc

SEQ ID NO: 915 - DNA, 20 bp, Artificial sequence
  Synthetic oligonucleotide
ctgtgtgtttacgttttctg

SEQ ID NO: 916 - DNA, 20 bp, Artificial sequence
  Synthetic oligonucleotide
tctgtgtgtttacgttttct

SEQ ID NO: 917 - DNA, 20 bp, Artificial sequence
  Synthetic oligonucleotide
ctctgtgtgtttacgttttc

SEQ ID NO: 918 - DNA, 20 bp, Artificial sequence
  Synthetic oligonucleotide
actctgtgtgtttacgtttt

SEQ ID NO: 919 - DNA, 20 bp, Artificial sequence
  Synthetic oligonucleotide
aactctgtgtgtttacgttt

SEQ ID NO: 920 - DNA, 20 bp, Artificial sequence
  Synthetic oligonucleotide
gaactctgtgtgtttacgtt

SEQ ID NO: 921 - DNA, 20 bp, Artificial sequence
  Synthetic oligonucleotide
agaactctgtgtgtttacgt

SEQ ID NO: 922 - DNA, 20 bp, Artificial sequence
  Synthetic oligonucleotide
tagaactctgtgtgtttacg

SEQ ID NO: 923 - DNA, 20 bp, Artificial sequence
  Synthetic oligonucleotide
ctagaactctgtgtgtttac

SEQ ID NO: 924 - DNA, 20 bp, Artificial sequence
  Synthetic oligonucleotide
cctagaactctgtgtgttta

SEQ ID NO: 925 - DNA, 20 bp, Artificial sequence
  Synthetic oligonucleotide
ccctagaactctgtgtgttt

SEQ ID NO: 926 - DNA, 20 bp, Artificial sequence
  Synthetic oligonucleotide
tccctagaactctgtgtgtt

SEQ ID NO: 927 - DNA, 20 bp, Artificial sequence
  Synthetic oligonucleotide
atccctagaactctgtgtgt

SEQ ID NO: 928 - DNA, 20 bp, Artificial sequence
  Synthetic oligonucleotide
aatccctagaactctgtgtg

SEQ ID NO: 929 - DNA, 20 bp, Artificial sequence
  Synthetic oligonucleotide
gaatccctagaactctgtgt

SEQ ID NO: 930 - DNA, 20 bp, Artificial sequence
  Synthetic oligonucleotide
tgaatccctagaactctgtg

SEQ ID NO: 931 - DNA, 20 bp, Artificial sequence
  Synthetic oligonucleotide
ctgaatccctagaactctgt

SEQ ID NO: 932 - DNA, 20 bp, Artificial sequence
  Synthetic oligonucleotide
tctgaatccctagaactctg

SEQ ID NO: 933 - DNA, 20 bp, Artificial sequence
  Synthetic oligonucleotide
ttctgaatccctagaactct

SEQ ID NO: 934 - DNA, 20 bp, Artificial sequence
  Synthetic oligonucleotide
cttctgaatccctagaactc

SEQ ID NO: 935 - DNA, 20 bp, Artificial sequence
  Synthetic oligonucleotide
gcttctgaatccctagaact

SEQ ID NO: 936 - DNA, 20 bp, Artificial sequence
  Synthetic oligonucleotide
agcttctgaatccctagaac

SEQ ID NO: 937 - DNA, 20 bp, Artificial sequence
  Synthetic oligonucleotide
tagcttctgaatccctagaa

SEQ ID NO: 938 - DNA, 20 bp, Artificial sequence
  Synthetic oligonucleotide
gtagcttctgaatccctaga

SEQ ID NO: 939 - DNA, 20 bp, Artificial sequence
  Synthetic oligonucleotide
ggtagcttctgaatccctag

SEQ ID NO: 940 - DNA, 20 bp, Artificial sequence
  Synthetic oligonucleotide
tggtagcttctgaatcccta

SEQ ID NO: 941 - DNA, 20 bp, Artificial sequence
  Synthetic oligonucleotide
ctggtagcttctgaatccct

SEQ ID NO: 942 - DNA, 20 bp, Artificial sequence
  Synthetic oligonucleotide
tctggtagcttctgaatccc

SEQ ID NO: 943 - DNA, 20 bp, Artificial sequence
  Synthetic oligonucleotide
ttctggtagcttctgaatcc

SEQ ID NO: 944 - DNA, 20 bp, Artificial sequence
  Synthetic oligonucleotide
tttctggtagcttctgaatc

SEQ ID NO: 945 - DNA, 20 bp, Artificial sequence
  Synthetic oligonucleotide
ttttctggtagcttctgaat

SEQ ID NO: 946 - DNA, 20 bp, Artificial sequence
  Synthetic oligonucleotide
tttttctggtagcttctgaa

SEQ ID NO: 947 - DNA, 20 bp, Artificial sequence
  Synthetic oligonucleotide
atgtacaaaaatgcatcatt

SEQ ID NO: 948 - DNA, 20 bp, Artificial sequence
  Synthetic oligonucleotide
aatgtacaaaaatgcatcat

SEQ ID NO: 949 - DNA, 20 bp, Artificial sequence
  Synthetic oligonucleotide
aaatgtacaaaaatgcatca

SEQ ID NO: 950 - DNA, 20 bp, Artificial sequence
  Synthetic oligonucleotide
taaatgtacaaaaatgcatc

SEQ ID NO: 951 - DNA, 20 bp, Artificial sequence
  Synthetic oligonucleotide
cataaatgtacaaaaatgca

SEQ ID NO: 952 - DNA, 20 bp, Artificial sequence
  Synthetic oligonucleotide
tcataaatgtacaaaaatgc

SEQ ID NO: 953 - DNA, 20 bp, Artificial sequence
  Synthetic oligonucleotide
ctgattcataaatgtacaaa

SEQ ID NO: 954 - DNA, 20 bp, Artificial sequence
  Synthetic oligonucleotide
cctgattcataaatgtacaa

SEQ ID NO: 955 - DNA, 20 bp, Artificial sequence
  Synthetic oligonucleotide
acctgattcataaatgtaca

SEQ ID NO: 956 - DNA, 20 bp, Artificial sequence
  Synthetic oligonucleotide
cacctgattcataaatgtac

SEQ ID NO: 957 - DNA, 20 bp, Artificial sequence
  Synthetic oligonucleotide
ccacctgattcataaatgta

SEQ ID NO: 958 - DNA, 20 bp, Artificial sequence
  Synthetic oligonucleotide
accacctgattcataaatgt

SEQ ID NO: 959 - DNA, 20 bp, Artificial sequence
  Synthetic oligonucleotide
gaccacctgattcataaatg

SEQ ID NO: 960 - DNA, 20 bp, Artificial sequence
  Synthetic oligonucleotide
ggaccacctgattcataaat

SEQ ID NO: 961 - DNA, 20 bp, Artificial sequence
  Synthetic oligonucleotide
ctggaccacctgattcataa

SEQ ID NO: 962 - DNA, 20 bp, Artificial sequence
  Synthetic oligonucleotide
cctggaccacctgattcata

SEQ ID NO: 963 - DNA, 20 bp, Artificial sequence
  Synthetic oligonucleotide
gcctggaccacctgattcat

SEQ ID NO: 964 - DNA, 20 bp, Artificial sequence
  Synthetic oligonucleotide
gctctgtcattttgctatgg

SEQ ID NO: 965 - DNA, 20 bp, Artificial sequence
  Synthetic oligonucleotide
ggctctgtcattttgctatg

SEQ ID NO: 966 - DNA, 20 bp, Artificial sequence
  Synthetic oligonucleotide
tggctctgtcattttgctat

SEQ ID NO: 967 - DNA, 20 bp, Artificial sequence
  Synthetic oligonucleotide
atggctctgtcattttgcta

SEQ ID NO: 968 - DNA, 20 bp, Artificial sequence
  Synthetic oligonucleotide
gatggctctgtcattttgct

SEQ ID NO: 969 - DNA, 20 bp, Artificial sequence
  Synthetic oligonucleotide
agatggctctgtcattttgc

SEQ ID NO: 970 - DNA, 20 bp, Artificial sequence
  Synthetic oligonucleotide
aagatggctctgtcattttg

SEQ ID NO: 971 - DNA, 20 bp, Artificial sequence
  Synthetic oligonucleotide
aaagatggctctgtcatttt

SEQ ID NO: 972 - DNA, 20 bp, Artificial sequence
  Synthetic oligonucleotide
taaagatggctctgtcattt

SEQ ID NO: 973 - DNA, 20 bp, Artificial sequence
  Synthetic oligonucleotide
gtaaagatggctctgtcatt

SEQ ID NO: 974 - DNA, 20 bp, Artificial sequence
  Synthetic oligonucleotide
tgtaaagatggctctgtcat

SEQ ID NO: 975 - DNA, 20 bp, Artificial sequence
  Synthetic oligonucleotide
ttgtaaagatggctctgtca

SEQ ID NO: 976 - DNA, 20 bp, Artificial sequence
  Synthetic oligonucleotide
tttgtaaagatggctctgtc

SEQ ID NO: 977 - DNA, 20 bp, Artificial sequence
  Synthetic oligonucleotide
ttttgtaaagatggctctgt

SEQ ID NO: 978 - DNA, 20 bp, Artificial sequence
  Synthetic oligonucleotide
gttttgtaaagatggctctg

SEQ ID NO: 979 - DNA, 20 bp, Artificial sequence
  Synthetic oligonucleotide
tgttttgtaaagatggctct

SEQ ID NO: 980 - DNA, 20 bp, Artificial sequence
  Synthetic oligonucleotide
ttgttttgtaaagatggctc

SEQ ID NO: 981 - DNA, 20 bp, Artificial sequence
  Synthetic oligonucleotide
tttgttttgtaaagatggct

SEQ ID NO: 982 - DNA, 20 bp, Artificial sequence
  Synthetic oligonucleotide
ctttgttttgtaaagatggc

SEQ ID NO: 983 - DNA, 20 bp, Artificial sequence
  Synthetic oligonucleotide
tctttgttttgtaaagatgg

SEQ ID NO: 984 - DNA, 20 bp, Artificial sequence
  Synthetic oligonucleotide
gctgtctttgttttgtaaag

SEQ ID NO: 985 - DNA, 20 bp, Artificial sequence
  Synthetic oligonucleotide
agctgtctttgttttgtaaa

SEQ ID NO: 986 - DNA, 20 bp, Artificial sequence
  Synthetic oligonucleotide
gagctgtctttgttttgtaa

SEQ ID NO: 987 - DNA, 20 bp, Artificial sequence
  Synthetic oligonucleotide
agagctgtctttgttttgta

SEQ ID NO: 988 - DNA, 20 bp, Artificial sequence
  Synthetic oligonucleotide
aagagctgtctttgttttgt

SEQ ID NO: 989 - DNA, 20 bp, Artificial sequence
  Synthetic oligonucleotide
ctttgattctgagcaagagc

SEQ ID NO: 990 - DNA, 20 bp, Artificial sequence
  Synthetic oligonucleotide
tctttgattctgagcaagag

SEQ ID NO: 991 - DNA, 20 bp, Artificial sequence
  Synthetic oligonucleotide
atctttgattctgagcaaga

SEQ ID NO: 992 - DNA, 20 bp, Artificial sequence
  Synthetic oligonucleotide
catctttgattctgagcaag

SEQ ID NO: 993 - DNA, 20 bp, Artificial sequence
  Synthetic oligonucleotide
acatctttgattctgagcaa

SEQ ID NO: 994 - DNA, 20 bp, Artificial sequence
  Synthetic oligonucleotide
aacatctttgattctgagca

SEQ ID NO: 995 - DNA, 20 bp, Artificial sequence
  Synthetic oligonucleotide
taacatctttgattctgagc

SEQ ID NO: 996 - DNA, 20 bp, Artificial sequence
  Synthetic oligonucleotide
ctaacatctttgattctgag

SEQ ID NO: 997 - DNA, 20 bp, Artificial sequence
  Synthetic oligonucleotide
tctaacatctttgattctga

SEQ ID NO: 998 - DNA, 20 bp, Artificial sequence
  Synthetic oligonucleotide
ttctaacatctttgattctg

SEQ ID NO: 999 - DNA, 20 bp, Artificial sequence
  Synthetic oligonucleotide
gttctaacatctttgattct

SEQ ID NO: 1000 - DNA, 20 bp, Artificial sequence
  Synthetic oligonucleotide
tgttctaacatctttgattc

SEQ ID NO: 1001 - DNA, 20 bp, Artificial sequence
  Synthetic oligonucleotide
aattgtctcttgttctaaca

SEQ ID NO: 1002 - DNA, 20 bp, Artificial sequence
  Synthetic oligonucleotide
caattgtctcttgttctaac

SEQ ID NO: 1003 - DNA, 20 bp, Artificial sequence
  Synthetic oligonucleotide
acaattgtctcttgttctaa

SEQ ID NO: 1004 - DNA, 20 bp, Artificial sequence
  Synthetic oligonucleotide
tacaattgtctcttgttcta

SEQ ID NO: 1005 - DNA, 20 bp, Artificial sequence
  Synthetic oligonucleotide
ctacaattgtctcttgttct

SEQ ID NO: 1006 - DNA, 20 bp, Artificial sequence
  Synthetic oligonucleotide
gctacaattgtctcttgttc

SEQ ID NO: 1007 - DNA, 20 bp, Artificial sequence
  Synthetic oligonucleotide
tgctacaattgtctcttgtt

SEQ ID NO: 1008 - DNA, 20 bp, Artificial sequence
  Synthetic oligonucleotide
gatgctacaattgtctcttg

SEQ ID NO: 1009 - DNA, 20 bp, Artificial sequence
  Synthetic oligonucleotide
tgatgctacaattgtctctt

SEQ ID NO: 1010 - DNA, 20 bp, Artificial sequence
  Synthetic oligonucleotide
ctgatgctacaattgtctct

SEQ ID NO: 1011 - DNA, 20 bp, Artificial sequence
  Synthetic oligonucleotide
tctgatgctacaattgtctc

SEQ ID NO: 1012 - DNA, 20 bp, Artificial sequence
  Synthetic oligonucleotide
ttctgatgctacaattgtct

SEQ ID NO: 1013 - DNA, 20 bp, Artificial sequence
  Synthetic oligonucleotide
cttctgatgctacaattgtc

SEQ ID NO: 1014 - DNA, 20 bp, Artificial sequence
  Synthetic oligonucleotide
gcttctgatgctacaattgt

SEQ ID NO: 1015 - DNA, 20 bp, Artificial sequence
  Synthetic oligonucleotide
cagcttctgatgctacaatt

SEQ ID NO: 1016 - DNA, 20 bp, Artificial sequence
  Synthetic oligonucleotide
ccagcttctgatgctacaat

SEQ ID NO: 1017 - DNA, 20 bp, Artificial sequence
  Synthetic oligonucleotide
tccagcttctgatgctacaa

SEQ ID NO: 1018 - DNA, 20 bp, Artificial sequence
  Synthetic oligonucleotide
ctccagcttctgatgctaca

SEQ ID NO: 1019 - DNA, 20 bp, Artificial sequence
  Synthetic oligonucleotide
tctccagcttctgatgctac

SEQ ID NO: 1020 - DNA, 20 bp, Artificial sequence
  Synthetic oligonucleotide
ttctccagcttctgatgcta

SEQ ID NO: 1021 - DNA, 20 bp, Artificial sequence
  Synthetic oligonucleotide
ttttctccagcttctgatgc

SEQ ID NO: 1022 - DNA, 20 bp, Artificial sequence
  Synthetic oligonucleotide
attttctccagcttctgatg

SEQ ID NO: 1023 - DNA, 20 bp, Artificial sequence
  Synthetic oligonucleotide
cattttctccagcttctgat

SEQ ID NO: 1024 - DNA, 20 bp, Artificial sequence
  Synthetic oligonucleotide
tcattttctccagcttctga

SEQ ID NO: 1025 - DNA, 20 bp, Artificial sequence
  Synthetic oligonucleotide
ctcattttctccagcttctg

SEQ ID NO: 1026 - DNA, 20 bp, Artificial sequence
  Synthetic oligonucleotide
tctcattttctccagcttct

SEQ ID NO: 1027 - DNA, 20 bp, Artificial sequence
  Synthetic oligonucleotide
ttctcattttctccagcttc

SEQ ID NO: 1028 - DNA, 20 bp, Artificial sequence
  Synthetic oligonucleotide
tttctcattttctccagctt

SEQ ID NO: 1029 - DNA, 20 bp, Artificial sequence
  Synthetic oligonucleotide
gtttctcattttctccagct

SEQ ID NO: 1030 - DNA, 20 bp, Artificial sequence
  Synthetic oligonucleotide
tgtttctcattttctccagc

SEQ ID NO: 1031 - DNA, 20 bp, Artificial sequence
  Synthetic oligonucleotide
atgtttctcattttctccag

SEQ ID NO: 1032 - DNA, 20 bp, Artificial sequence
  Synthetic oligonucleotide
tatgtttctcattttctcca

SEQ ID NO: 1033 - DNA, 20 bp, Artificial sequence
  Synthetic oligonucleotide
ttatgtttctcattttctcc

SEQ ID NO: 1034 - DNA, 20 bp, Artificial sequence
  Synthetic oligonucleotide
tttatgtttctcattttctc

SEQ ID NO: 1035 - DNA, 20 bp, Artificial sequence
  Synthetic oligonucleotide
atgttccaggaaagattttt

SEQ ID NO: 1036 - DNA, 20 bp, Artificial sequence
  Synthetic oligonucleotide
tatgttccaggaaagatttt

SEQ ID NO: 1037 - DNA, 20 bp, Artificial sequence
  Synthetic oligonucleotide
ctatgttccaggaaagattt

SEQ ID NO: 1038 - DNA, 20 bp, Artificial sequence
  Synthetic oligonucleotide
gctatgttccaggaaagatt

SEQ ID NO: 1039 - DNA, 20 bp, Artificial sequence
  Synthetic oligonucleotide
agctatgttccaggaaagat

SEQ ID NO: 1040 - DNA, 20 bp, Artificial sequence
  Synthetic oligonucleotide
gagctatgttccaggaaaga

SEQ ID NO: 1041 - DNA, 20 bp, Artificial sequence
  Synthetic oligonucleotide
agagctatgttccaggaaag

SEQ ID NO: 1042 - DNA, 20 bp, Artificial sequence
  Synthetic oligonucleotide
aagagctatgttccaggaaa

SEQ ID NO: 1043 - DNA, 20 bp, Artificial sequence
  Synthetic oligonucleotide
aaagagctatgttccaggaa

SEQ ID NO: 1044 - DNA, 20 bp, Artificial sequence
  Synthetic oligonucleotide
taaagagctatgttccagga

SEQ ID NO: 1045 - DNA, 20 bp, Artificial sequence
  Synthetic oligonucleotide
ctaaagagctatgttccagg

SEQ ID NO: 1046 - DNA, 20 bp, Artificial sequence
  Synthetic oligonucleotide
tctaaagagctatgttccag

SEQ ID NO: 1047 - DNA, 20 bp, Artificial sequence
  Synthetic oligonucleotide
ttctaaagagctatgttcca

SEQ ID NO: 1048 - DNA, 20 bp, Artificial sequence
  Synthetic oligonucleotide
tttctaaagagctatgttcc

SEQ ID NO: 1049 - DNA, 20 bp, Artificial sequence
  Synthetic oligonucleotide
ttttctaaagagctatgttc

SEQ ID NO: 1050 - DNA, 20 bp, Artificial sequence
  Synthetic oligonucleotide
attttctaaagagctatgtt

SEQ ID NO: 1051 - DNA, 20 bp, Artificial sequence
  Synthetic oligonucleotide
gattttctaaagagctatgt

SEQ ID NO: 1052 - DNA, 20 bp, Artificial sequence
  Synthetic oligonucleotide
ggattttctaaagagctatg

SEQ ID NO: 1053 - DNA, 20 bp, Artificial sequence
  Synthetic oligonucleotide
cggattttctaaagagctat

SEQ ID NO: 1054 - DNA, 20 bp, Artificial sequence
  Synthetic oligonucleotide
acggattttctaaagagcta

SEQ ID NO: 1055 - DNA, 20 bp, Artificial sequence
  Synthetic oligonucleotide
cacggattttctaaagagct

SEQ ID NO: 1056 - DNA, 20 bp, Artificial sequence
  Synthetic oligonucleotide
acacggattttctaaagagc

SEQ ID NO: 1057 - DNA, 20 bp, Artificial sequence
  Synthetic oligonucleotide
cacacggattttctaaagag

SEQ ID NO: 1058 - DNA, 20 bp, Artificial sequence
  Synthetic oligonucleotide
ccacacggattttctaaaga

SEQ ID NO: 1059 - DNA, 20 bp, Artificial sequence
  Synthetic oligonucleotide
tccacacggattttctaaag

SEQ ID NO: 1060 - DNA, 20 bp, Artificial sequence
  Synthetic oligonucleotide
tctaaactggttccacacgg

SEQ ID NO: 1061 - DNA, 20 bp, Artificial sequence
  Synthetic oligonucleotide
ttctaaactggttccacacg

SEQ ID NO: 1062 - DNA, 20 bp, Artificial sequence
  Synthetic oligonucleotide
tttctaaactggttccacac

SEQ ID NO: 1063 - DNA, 20 bp, Artificial sequence
  Synthetic oligonucleotide
atttctaaactggttccaca

SEQ ID NO: 1064 - DNA, 20 bp, Artificial sequence
  Synthetic oligonucleotide
catttctaaactggttccac

SEQ ID NO: 1065 - DNA, 20 bp, Artificial sequence
  Synthetic oligonucleotide
acatttctaaactggttcca

SEQ ID NO: 1066 - DNA, 20 bp, Artificial sequence
  Synthetic oligonucleotide
aacatttctaaactggttcc

SEQ ID NO: 1067 - DNA, 20 bp, Artificial sequence
  Synthetic oligonucleotide
aaacatttctaaactggttc

SEQ ID NO: 1068 - DNA, 20 bp, Artificial sequence
  Synthetic oligonucleotide
aaaacatttctaaactggtt

SEQ ID NO: 1069 - DNA, 20 bp, Artificial sequence
  Synthetic oligonucleotide
aaaaacatttctaaactggt

SEQ ID NO: 1070 - DNA, 20 bp, Artificial sequence
  Synthetic oligonucleotide
taaaaacatttctaaactgg

SEQ ID NO: 1071 - DNA, 20 bp, Artificial sequence
  Synthetic oligonucleotide
gcttaaaaacatttctaaac

SEQ ID NO: 1072 - DNA, 20 bp, Artificial sequence
  Synthetic oligonucleotide
ggcttaaaaacatttctaaa

SEQ ID NO: 1073 - DNA, 20 bp, Artificial sequence
  Synthetic oligonucleotide
gggcttaaaaacatttctaa

SEQ ID NO: 1074 - DNA, 20 bp, Artificial sequence
  Synthetic oligonucleotide
agggcttaaaaacatttcta

SEQ ID NO: 1075 - DNA, 20 bp, Artificial sequence
  Synthetic oligonucleotide
aagggcttaaaaacatttct

SEQ ID NO: 1076 - DNA, 20 bp, Artificial sequence
  Synthetic oligonucleotide
aaagggcttaaaaacatttc

SEQ ID NO: 1077 - DNA, 20 bp, Artificial sequence
  Synthetic oligonucleotide
aaaagggcttaaaaacattt

SEQ ID NO: 1078 - DNA, 20 bp, Artificial sequence
  Synthetic oligonucleotide
gaaaagggcttaaaaacatt

SEQ ID NO: 1079 - DNA, 20 bp, Artificial sequence
  Synthetic oligonucleotide
tgaaaagggcttaaaaacat

SEQ ID NO: 1080 - DNA, 20 bp, Artificial sequence
  Synthetic oligonucleotide
ctgaaaagggcttaaaaaca

SEQ ID NO: 1081 - DNA, 20 bp, Artificial sequence
  Synthetic oligonucleotide
tctgaaaagggcttaaaaac

SEQ ID NO: 1082 - DNA, 20 bp, Artificial sequence
  Synthetic oligonucleotide
gtctgaaaagggcttaaaaa

SEQ ID NO: 1083 - DNA, 20 bp, Artificial sequence
  Synthetic oligonucleotide
tgtctgaaaagggcttaaaa

SEQ ID NO: 1084 - DNA, 20 bp, Artificial sequence
  Synthetic oligonucleotide
gtgtctgaaaagggcttaaa

SEQ ID NO: 1085 - DNA, 20 bp, Artificial sequence
  Synthetic oligonucleotide
ggtgtctgaaaagggcttaa

SEQ ID NO: 1086 - DNA, 20 bp, Artificial sequence
  Synthetic oligonucleotide
tggtgtctgaaaagggctta

SEQ ID NO: 1087 - DNA, 20 bp, Artificial sequence
  Synthetic oligonucleotide
atggtgtctgaaaagggctt

SEQ ID NO: 1088 - DNA, 20 bp, Artificial sequence
  Synthetic oligonucleotide
catggtgtctgaaaagggct

SEQ ID NO: 1089 - DNA, 20 bp, Artificial sequence
  Synthetic oligonucleotide
acatggtgtctgaaaagggc

SEQ ID NO: 1090 - DNA, 20 bp, Artificial sequence
  Synthetic oligonucleotide
tcctcaaagtgacatggtgt

SEQ ID NO: 1091 - DNA, 20 bp, Artificial sequence
  Synthetic oligonucleotide
ctcctcaaagtgacatggtg

SEQ ID NO: 1092 - DNA, 20 bp, Artificial sequence
  Synthetic oligonucleotide
tctcctcaaagtgacatggt

SEQ ID NO: 1093 - DNA, 20 bp, Artificial sequence
  Synthetic oligonucleotide
ctctcctcaaagtgacatgg

SEQ ID NO: 1094 - DNA, 20 bp, Artificial sequence
  Synthetic oligonucleotide
actctcctcaaagtgacatg

SEQ ID NO: 1095 - DNA, 20 bp, Artificial sequence
  Synthetic oligonucleotide
ctgcccactctcctcaaagt

SEQ ID NO: 1096 - DNA, 20 bp, Artificial sequence
  Synthetic oligonucleotide
tcctgcccactctcctcaaa

SEQ ID NO: 1097 - DNA, 20 bp, Artificial sequence
  Synthetic oligonucleotide
atcctgcccactctcctcaa

SEQ ID NO: 1098 - DNA, 20 bp, Artificial sequence
  Synthetic oligonucleotide
tagatcctgcccactctcct

SEQ ID NO: 1099 - DNA, 20 bp, Artificial sequence
  Synthetic oligonucleotide
tctagatcctgcccactctc

SEQ ID NO: 1100 - DNA, 20 bp, Artificial sequence
  Synthetic oligonucleotide
ttctagatcctgcccactct

SEQ ID NO: 1101 - DNA, 20 bp, Artificial sequence
  Synthetic oligonucleotide
tttctagatcctgcccactc

SEQ ID NO: 1102 - DNA, 20 bp, Artificial sequence
  Synthetic oligonucleotide
atttctagatcctgcccact

SEQ ID NO: 1103 - DNA, 20 bp, Artificial sequence
  Synthetic oligonucleotide
tatttctagatcctgcccac

SEQ ID NO: 1104 - DNA, 20 bp, Artificial sequence
  Synthetic oligonucleotide
atatttctagatcctgccca

SEQ ID NO: 1105 - DNA, 20 bp, Artificial sequence
  Synthetic oligonucleotide
catatttctagatcctgccc

SEQ ID NO: 1106 - DNA, 20 bp, Artificial sequence
  Synthetic oligonucleotide
ccatatttctagatcctgcc

SEQ ID NO: 1107 - DNA, 20 bp, Artificial sequence
  Synthetic oligonucleotide
tccatatttctagatcctgc

SEQ ID NO: 1108 - DNA, 20 bp, Artificial sequence
  Synthetic oligonucleotide
ttccatatttctagatcctg

SEQ ID NO: 1109 - DNA, 20 bp, Artificial sequence
  Synthetic oligonucleotide
tttccatatttctagatcct

SEQ ID NO: 1110 - DNA, 20 bp, Artificial sequence
  Synthetic oligonucleotide
ctttccatatttctagatcc

SEQ ID NO: 1111 - DNA, 20 bp, Artificial sequence
  Synthetic oligonucleotide
tctttccatatttctagatc

SEQ ID NO: 1112 - DNA, 20 bp, Artificial sequence
  Synthetic oligonucleotide
ttctttccatatttctagat

SEQ ID NO: 1113 - DNA, 20 bp, Artificial sequence
  Synthetic oligonucleotide
tttctttccatatttctaga

SEQ ID NO: 1114 - DNA, 20 bp, Artificial sequence
  Synthetic oligonucleotide
ctttctttccatatttctag

SEQ ID NO: 1115 - DNA, 20 bp, Artificial sequence
  Synthetic oligonucleotide
actttctttccatatttcta

SEQ ID NO: 1116 - DNA, 20 bp, Artificial sequence
  Synthetic oligonucleotide
tactttctttccatatttct

SEQ ID NO: 1117 - DNA, 20 bp, Artificial sequence
  Synthetic oligonucleotide
gtactttctttccatatttc

SEQ ID NO: 1118 - DNA, 20 bp, Artificial sequence
  Synthetic oligonucleotide
agtactttctttccatattt

SEQ ID NO: 1119 - DNA, 20 bp, Artificial sequence
  Synthetic oligonucleotide
tagtactttctttccatatt

SEQ ID NO: 1120 - DNA, 20 bp, Artificial sequence
  Synthetic oligonucleotide
gtagtactttctttccatat

SEQ ID NO: 1121 - DNA, 20 bp, Artificial sequence
  Synthetic oligonucleotide
agtagtactttctttccata

SEQ ID NO: 1122 - DNA, 20 bp, Artificial sequence
  Synthetic oligonucleotide
cagtagtactttctttccat

SEQ ID NO: 1123 - DNA, 20 bp, Artificial sequence
  Synthetic oligonucleotide
acagtagtactttctttcca

SEQ ID NO: 1124 - DNA, 20 bp, Artificial sequence
  Synthetic oligonucleotide
aacagtagtactttctttcc

SEQ ID NO: 1125 - DNA, 20 bp, Artificial sequence
  Synthetic oligonucleotide
taacagtagtactttctttc

SEQ ID NO: 1126 - DNA, 20 bp, Artificial sequence
  Synthetic oligonucleotide
ttaacagtagtactttcttt

SEQ ID NO: 1127 - DNA, 20 bp, Artificial sequence
  Synthetic oligonucleotide
attaacagtagtactttctt

SEQ ID NO: 1128 - DNA, 20 bp, Artificial sequence
  Synthetic oligonucleotide
cattaacagtagtactttct

SEQ ID NO: 1129 - DNA, 20 bp, Artificial sequence
  Synthetic oligonucleotide
ccattaacagtagtactttc

SEQ ID NO: 1130 - DNA, 20 bp, Artificial sequence
  Synthetic oligonucleotide
gccattaacagtagtacttt

SEQ ID NO: 1131 - DNA, 20 bp, Artificial sequence
  Synthetic oligonucleotide
tgccattaacagtagtactt

SEQ ID NO: 1132 - DNA, 20 bp, Artificial sequence
  Synthetic oligonucleotide
atgccattaacagtagtact

SEQ ID NO: 1133 - DNA, 20 bp, Artificial sequence
  Synthetic oligonucleotide
catgccattaacagtagtac

SEQ ID NO: 1134 - DNA, 20 bp, Artificial sequence
  Synthetic oligonucleotide
ccatgccattaacagtagta

SEQ ID NO: 1135 - DNA, 20 bp, Artificial sequence
  Synthetic oligonucleotide
gccatgccattaacagtagt

SEQ ID NO: 1136 - DNA, 20 bp, Artificial sequence
  Synthetic oligonucleotide
agccatgccattaacagtag

SEQ ID NO: 1137 - DNA, 20 bp, Artificial sequence
  Synthetic oligonucleotide
cagccatgccattaacagta

SEQ ID NO: 1138 - DNA, 20 bp, Artificial sequence
  Synthetic oligonucleotide
tcaagatgttggcagccatg

SEQ ID NO: 1139 - DNA, 20 bp, Artificial sequence
  Synthetic oligonucleotide
ttcaagatgttggcagccat

SEQ ID NO: 1140 - DNA, 20 bp, Artificial sequence
  Synthetic oligonucleotide
tttcaagatgttggcagcca

SEQ ID NO: 1141 - DNA, 20 bp, Artificial sequence
  Synthetic oligonucleotide
ttttcaagatgttggcagcc

SEQ ID NO: 1142 - DNA, 20 bp, Artificial sequence
  Synthetic oligonucleotide
tttttcaagatgttggcagc

SEQ ID NO: 1143 - DNA, 20 bp, Artificial sequence
  Synthetic oligonucleotide
atttttcaagatgttggcag

SEQ ID NO: 1144 - DNA, 20 bp, Artificial sequence
  Synthetic oligonucleotide
tatttttcaagatgttggca

SEQ ID NO: 1145 - DNA, 20 bp, Artificial sequence
  Synthetic oligonucleotide
ttatttttcaagatgttggc

SEQ ID NO: 1146 - DNA, 20 bp, Artificial sequence
  Synthetic oligonucleotide
attatttttcaagatgttgg

SEQ ID NO: 1147 - DNA, 20 bp, Artificial sequence
  Synthetic oligonucleotide
gttgattctgaattctatta

SEQ ID NO: 1148 - DNA, 20 bp, Artificial sequence
  Synthetic oligonucleotide
ggttgattctgaattctatt

SEQ ID NO: 1149 - DNA, 20 bp, Artificial sequence
  Synthetic oligonucleotide
tggttgattctgaattctat

SEQ ID NO: 1150 - DNA, 20 bp, Artificial sequence
  Synthetic oligonucleotide
ttggttgattctgaattcta

SEQ ID NO: 1151 - DNA, 20 bp, Artificial sequence
  Synthetic oligonucleotide
tttggttgattctgaattct

SEQ ID NO: 1152 - DNA, 20 bp, Artificial sequence
  Synthetic oligonucleotide
ctttggttgattctgaattc

SEQ ID NO: 1153 - DNA, 20 bp, Artificial sequence
  Synthetic oligonucleotide
tctttggttgattctgaatt

SEQ ID NO: 1154 - DNA, 20 bp, Artificial sequence
  Synthetic oligonucleotide
ctctttggttgattctgaat

SEQ ID NO: 1155 - DNA, 20 bp, Artificial sequence
  Synthetic oligonucleotide
tctctttggttgattctgaa

SEQ ID NO: 1156 - DNA, 20 bp, Artificial sequence
  Synthetic oligonucleotide
atctctttggttgattctga

SEQ ID NO: 1157 - DNA, 20 bp, Artificial sequence
  Synthetic oligonucleotide
aatctctttggttgattctg

SEQ ID NO: 1158 - DNA, 20 bp, Artificial sequence
  Synthetic oligonucleotide
aaatctctttggttgattct

SEQ ID NO: 1159 - DNA, 20 bp, Artificial sequence
  Synthetic oligonucleotide
taaatctctttggttgattc

SEQ ID NO: 1160 - DNA, 20 bp, Artificial sequence
  Synthetic oligonucleotide
ttaaatctctttggttgatt

SEQ ID NO: 1161 - DNA, 20 bp, Artificial sequence
  Synthetic oligonucleotide
tttaaatctctttggttgat

SEQ ID NO: 1162 - DNA, 20 bp, Artificial sequence
  Synthetic oligonucleotide
ctttaaatctctttggttga

SEQ ID NO: 1163 - DNA, 20 bp, Artificial sequence
  Synthetic oligonucleotide
tctttaaatctctttggttg

SEQ ID NO: 1164 - DNA, 20 bp, Artificial sequence
  Synthetic oligonucleotide
atctttaaatctctttggtt

SEQ ID NO: 1165 - DNA, 20 bp, Artificial sequence
  Synthetic oligonucleotide
catctttaaatctctttggt

SEQ ID NO: 1166 - DNA, 20 bp, Artificial sequence
  Synthetic oligonucleotide
gcatctttaaatctctttgg

SEQ ID NO: 1167 - DNA, 20 bp, Artificial sequence
  Synthetic oligonucleotide
agcatctttaaatctctttg

SEQ ID NO: 1168 - DNA, 20 bp, Artificial sequence
  Synthetic oligonucleotide
tagcatctttaaatctcttt

SEQ ID NO: 1169 - DNA, 20 bp, Artificial sequence
  Synthetic oligonucleotide
gtagcatctttaaatctctt

SEQ ID NO: 1170 - DNA, 20 bp, Artificial sequence
  Synthetic oligonucleotide
agtagcatctttaaatctct

SEQ ID NO: 1171 - DNA, 20 bp, Artificial sequence
  Synthetic oligonucleotide
cagtagcatctttaaatctc

SEQ ID NO: 1172 - DNA, 20 bp, Artificial sequence
  Synthetic oligonucleotide
tcagtagcatctttaaatct

SEQ ID NO: 1173 - DNA, 20 bp, Artificial sequence
  Synthetic oligonucleotide
ttcagtagcatctttaaatc

SEQ ID NO: 1174 - DNA, 20 bp, Artificial sequence
  Synthetic oligonucleotide
cttcagtagcatctttaaat

SEQ ID NO: 1175 - DNA, 20 bp, Artificial sequence
  Synthetic oligonucleotide
acttcagtagcatctttaaa

SEQ ID NO: 1176 - DNA, 20 bp, Artificial sequence
  Synthetic oligonucleotide
cacttcagtagcatctttaa

SEQ ID NO: 1177 - DNA, 20 bp, Artificial sequence
  Synthetic oligonucleotide
ccacttcagtagcatcttta

SEQ ID NO: 1178 - DNA, 20 bp, Artificial sequence
  Synthetic oligonucleotide
cccacttcagtagcatcttt

SEQ ID NO: 1179 - DNA, 20 bp, Artificial sequence
  Synthetic oligonucleotide
tcccacttcagtagcatctt

SEQ ID NO: 1180 - DNA, 20 bp, Artificial sequence
  Synthetic oligonucleotide
atcccacttcagtagcatct

SEQ ID NO: 1181 - DNA, 20 bp, Artificial sequence
  Synthetic oligonucleotide
catcccacttcagtagcatc

SEQ ID NO: 1182 - DNA, 20 bp, Artificial sequence
  Synthetic oligonucleotide
gcatcccacttcagtagcat

SEQ ID NO: 1183 - DNA, 20 bp, Artificial sequence
  Synthetic oligonucleotide
ggcatcccacttcagtagca

SEQ ID NO: 1184 - DNA, 20 bp, Artificial sequence
  Synthetic oligonucleotide
tggcatcccacttcagtagc

SEQ ID NO: 1185 - DNA, 20 bp, Artificial sequence
  Synthetic oligonucleotide
ctggcatcccacttcagtag

SEQ ID NO: 1186 - DNA, 20 bp, Artificial sequence
  Synthetic oligonucleotide
gctggcatcccacttcagta

SEQ ID NO: 1187 - DNA, 20 bp, Artificial sequence
  Synthetic oligonucleotide
cataatgttgttgcaaaagg

SEQ ID NO: 1188 - DNA, 20 bp, Artificial sequence
  Synthetic oligonucleotide
ccataatgttgttgcaaaag

SEQ ID NO: 1189 - DNA, 20 bp, Artificial sequence
  Synthetic oligonucleotide
cccataatgttgttgcaaaa

SEQ ID NO: 1190 - DNA, 20 bp, Artificial sequence
  Synthetic oligonucleotide
ccccataatgttgttgcaaa

SEQ ID NO: 1191 - DNA, 20 bp, Artificial sequence
  Synthetic oligonucleotide
tccccataatgttgttgcaa

SEQ ID NO: 1192 - DNA, 20 bp, Artificial sequence
  Synthetic oligonucleotide
ctccccataatgttgttgca

SEQ ID NO: 1193 - DNA, 20 bp, Artificial sequence
  Synthetic oligonucleotide
actccccataatgttgttgc

SEQ ID NO: 1194 - DNA, 20 bp, Artificial sequence
  Synthetic oligonucleotide
tactccccataatgttgttg

SEQ ID NO: 1195 - DNA, 20 bp, Artificial sequence
  Synthetic oligonucleotide
gtactccccataatgttgtt

SEQ ID NO: 1196 - DNA, 20 bp, Artificial sequence
  Synthetic oligonucleotide
tgtactccccataatgttgt

SEQ ID NO: 1197 - DNA, 20 bp, Artificial sequence
  Synthetic oligonucleotide
atgtactccccataatgttg

SEQ ID NO: 1198 - DNA, 20 bp, Artificial sequence
  Synthetic oligonucleotide
tatgtactccccataatgtt

SEQ ID NO: 1199 - DNA, 20 bp, Artificial sequence
  Synthetic oligonucleotide
ctatgtactccccataatgt

SEQ ID NO: 1200 - DNA, 20 bp, Artificial sequence
  Synthetic oligonucleotide
actatgtactccccataatg

SEQ ID NO: 1201 - DNA, 20 bp, Artificial sequence
  Synthetic oligonucleotide
cactatgtactccccataat

SEQ ID NO: 1202 - DNA, 20 bp, Artificial sequence
  Synthetic oligonucleotide
gcactatgtactccccataa

SEQ ID NO: 1203 - DNA, 20 bp, Artificial sequence
  Synthetic oligonucleotide
agcactatgtactccccata

SEQ ID NO: 1204 - DNA, 20 bp, Artificial sequence
  Synthetic oligonucleotide
gagcactatgtactccccat

SEQ ID NO: 1205 - DNA, 20 bp, Artificial sequence
  Synthetic oligonucleotide
tgagcactatgtactcccca

SEQ ID NO: 1206 - DNA, 20 bp, Artificial sequence
  Synthetic oligonucleotide
ctgagcactatgtactcccc

SEQ ID NO: 1207 - DNA, 20 bp, Artificial sequence
  Synthetic oligonucleotide
tctgagcactatgtactccc

SEQ ID NO: 1208 - DNA, 20 bp, Artificial sequence
  Synthetic oligonucleotide
gtctgagcactatgtactcc

SEQ ID NO: 1209 - DNA, 20 bp, Artificial sequence
  Synthetic oligonucleotide
tgtctgagcactatgtactc

SEQ ID NO: 1210 - DNA, 20 bp, Artificial sequence
  Synthetic oligonucleotide
ctgtctgagcactatgtact

SEQ ID NO: 1211 - DNA, 20 bp, Artificial sequence
  Synthetic oligonucleotide
tctgtctgagcactatgtac

SEQ ID NO: 1212 - DNA, 20 bp, Artificial sequence
  Synthetic oligonucleotide
ctctgtctgagcactatgta

SEQ ID NO: 1213 - DNA, 20 bp, Artificial sequence
  Synthetic oligonucleotide
ttttctctttctctgtctga

SEQ ID NO: 1214 - DNA, 20 bp, Artificial sequence
  Synthetic oligonucleotide
tttttctctttctctgtctg

SEQ ID NO: 1215 - DNA, 20 bp, Artificial sequence
  Synthetic oligonucleotide
acaattgctagattcttttt

SEQ ID NO: 1216 - DNA, 20 bp, Artificial sequence
  Synthetic oligonucleotide
cacaattgctagattctttt

SEQ ID NO: 1217 - DNA, 20 bp, Artificial sequence
  Synthetic oligonucleotide
ccacaattgctagattcttt

SEQ ID NO: 1218 - DNA, 20 bp, Artificial sequence
  Synthetic oligonucleotide
tccacaattgctagattctt

SEQ ID NO: 1219 - DNA, 20 bp, Artificial sequence
  Synthetic oligonucleotide
ttccacaattgctagattct

SEQ ID NO: 1220 - DNA, 20 bp, Artificial sequence
  Synthetic oligonucleotide
cttccacaattgctagattc

SEQ ID NO: 1221 - DNA, 20 bp, Artificial sequence
  Synthetic oligonucleotide
tcttccacaattgctagatt

SEQ ID NO: 1222 - DNA, 20 bp, Artificial sequence
  Synthetic oligonucleotide
ttcttccacaattgctagat

SEQ ID NO: 1223 - DNA, 20 bp, Artificial sequence
  Synthetic oligonucleotide
cttcttccacaattgctaga

SEQ ID NO: 1224 - DNA, 20 bp, Artificial sequence
  Synthetic oligonucleotide
tcttcttccacaattgctag

SEQ ID NO: 1225 - DNA, 20 bp, Artificial sequence
  Synthetic oligonucleotide
ttcttcttccacaattgcta

SEQ ID NO: 1226 - DNA, 20 bp, Artificial sequence
  Synthetic oligonucleotide
tttcttcttccacaattgct

SEQ ID NO: 1227 - DNA, 20 bp, Artificial sequence
  Synthetic oligonucleotide
atttcttcttccacaattgc

SEQ ID NO: 1228 - DNA, 20 bp, Artificial sequence
  Synthetic oligonucleotide
catttcttcttccacaattg

SEQ ID NO: 1229 - DNA, 20 bp, Artificial sequence
  Synthetic oligonucleotide
acatttcttcttccacaatt

SEQ ID NO: 1230 - DNA, 20 bp, Artificial sequence
  Synthetic oligonucleotide
aacatttcttcttccacaat

SEQ ID NO: 1231 - DNA, 20 bp, Artificial sequence
  Synthetic oligonucleotide
aaacatttcttcttccacaa

SEQ ID NO: 1232 - DNA, 20 bp, Artificial sequence
  Synthetic oligonucleotide
aaaacatttcttcttccaca

SEQ ID NO: 1233 - DNA, 20 bp, Artificial sequence
  Synthetic oligonucleotide
aaaaacatttcttcttccac

SEQ ID NO: 1234 - DNA, 20 bp, Artificial sequence
  Synthetic oligonucleotide
taaaaacatttcttcttcca

SEQ ID NO: 1235 - DNA, 20 bp, Artificial sequence
  Synthetic oligonucleotide
ctaaaaacatttcttcttcc

SEQ ID NO: 1236 - DNA, 20 bp, Artificial sequence
  Synthetic oligonucleotide
actaaaaacatttcttcttc

SEQ ID NO: 1237 - DNA, 20 bp, Artificial sequence
  Synthetic oligonucleotide
ccataactaaaaacatttct

SEQ ID NO: 1238 - DNA, 20 bp, Artificial sequence
  Synthetic oligonucleotide
cccataactaaaaacatttc

SEQ ID NO: 1239 - DNA, 20 bp, Artificial sequence
  Synthetic oligonucleotide
gcccataactaaaaacattt

SEQ ID NO: 1240 - DNA, 20 bp, Artificial sequence
  Synthetic oligonucleotide
cgcccataactaaaaacatt

SEQ ID NO: 1241 - DNA, 20 bp, Artificial sequence
  Synthetic oligonucleotide
tcgcccataactaaaaacat

SEQ ID NO: 1242 - DNA, 20 bp, Artificial sequence
  Synthetic oligonucleotide
ctcgcccataactaaaaaca

SEQ ID NO: 1243 - DNA, 20 bp, Artificial sequence
  Synthetic oligonucleotide
actcgcccataactaaaaac

SEQ ID NO: 1244 - DNA, 20 bp, Artificial sequence
  Synthetic oligonucleotide
aactcgcccataactaaaaa

SEQ ID NO: 1245 - DNA, 20 bp, Artificial sequence
  Synthetic oligonucleotide
taactcgcccataactaaaa

SEQ ID NO: 1246 - DNA, 20 bp, Artificial sequence
  Synthetic oligonucleotide
ttaactcgcccataactaaa

SEQ ID NO: 1247 - DNA, 20 bp, Artificial sequence
  Synthetic oligonucleotide
tttaactcgcccataactaa

SEQ ID NO: 1248 - DNA, 20 bp, Artificial sequence
  Synthetic oligonucleotide
atttaactcgcccataacta

SEQ ID NO: 1249 - DNA, 20 bp, Artificial sequence
  Synthetic oligonucleotide
aatttaactcgcccataact

SEQ ID NO: 1250 - DNA, 20 bp, Artificial sequence
  Synthetic oligonucleotide
taatttaactcgcccataac

SEQ ID NO: 1251 - DNA, 20 bp, Artificial sequence
  Synthetic oligonucleotide
ataatttaactcgcccataa

SEQ ID NO: 1252 - DNA, 20 bp, Artificial sequence
  Synthetic oligonucleotide
cataatttaactcgcccata

SEQ ID NO: 1253 - DNA, 20 bp, Artificial sequence
  Synthetic oligonucleotide
acataatttaactcgcccat

SEQ ID NO: 1254 - DNA, 20 bp, Artificial sequence
  Synthetic oligonucleotide
aacataatttaactcgccca

SEQ ID NO: 1255 - DNA, 20 bp, Artificial sequence
  Synthetic oligonucleotide
gaacataatttaactcgccc

SEQ ID NO: 1256 - DNA, 20 bp, Artificial sequence
  Synthetic oligonucleotide
ggaacataatttaactcgcc

SEQ ID NO: 1257 - DNA, 20 bp, Artificial sequence
  Synthetic oligonucleotide
tggaacataatttaactcgc

SEQ ID NO: 1258 - DNA, 20 bp, Artificial sequence
  Synthetic oligonucleotide
agttataaagccagtggaac

SEQ ID NO: 1259 - DNA, 20 bp, Artificial sequence
  Synthetic oligonucleotide
gagttataaagccagtggaa

SEQ ID NO: 1260 - DNA, 20 bp, Artificial sequence
  Synthetic oligonucleotide
tgagttataaagccagtgga

SEQ ID NO: 1261 - DNA, 20 bp, Artificial sequence
  Synthetic oligonucleotide
atgagttataaagccagtgg

SEQ ID NO: 1262 - DNA, 20 bp, Artificial sequence
  Synthetic oligonucleotide
catgagttataaagccagtg

SEQ ID NO: 1263 - DNA, 20 bp, Artificial sequence
  Synthetic oligonucleotide
acatgagttataaagccagt

SEQ ID NO: 1264 - DNA, 20 bp, Artificial sequence
  Synthetic oligonucleotide
tacatgagttataaagccag

SEQ ID NO: 1265 - DNA, 20 bp, Artificial sequence
  Synthetic oligonucleotide
ctacatgagttataaagcca

SEQ ID NO: 1266 - DNA, 20 bp, Artificial sequence
  Synthetic oligonucleotide
actacatgagttataaagcc

SEQ ID NO: 1267 - DNA, 20 bp, Artificial sequence
  Synthetic oligonucleotide
ttcattttgtactacatgag

SEQ ID NO: 1268 - DNA, 20 bp, Artificial sequence
  Synthetic oligonucleotide
tttcattttgtactacatga

SEQ ID NO: 1269 - DNA, 20 bp, Artificial sequence
  Synthetic oligonucleotide
ttttcattttgtactacatg

SEQ ID NO: 1270 - DNA, 20 bp, Artificial sequence
  Synthetic oligonucleotide
gtttcagttgatttagtttt

SEQ ID NO: 1271 - DNA, 20 bp, Artificial sequence
  Synthetic oligonucleotide
tgtttcagttgatttagttt

SEQ ID NO: 1272 - DNA, 20 bp, Artificial sequence
  Synthetic oligonucleotide
ctgtttcagttgatttagtt

SEQ ID NO: 1273 - DNA, 20 bp, Artificial sequence
  Synthetic oligonucleotide
tctgtttcagttgatttagt

SEQ ID NO: 1274 - DNA, 20 bp, Artificial sequence
  Synthetic oligonucleotide
ttctgtttcagttgatttag

SEQ ID NO: 1275 - DNA, 20 bp, Artificial sequence
  Synthetic oligonucleotide
gttctgtttcagttgattta

SEQ ID NO: 1276 - DNA, 20 bp, Artificial sequence
  Synthetic oligonucleotide
tgttctgtttcagttgattt

SEQ ID NO: 1277 - DNA, 20 bp, Artificial sequence
  Synthetic oligonucleotide
atgttctgtttcagttgatt

SEQ ID NO: 1278 - DNA, 20 bp, Artificial sequence
  Synthetic oligonucleotide
aatgttctgtttcagttgat

SEQ ID NO: 1279 - DNA, 20 bp, Artificial sequence
  Synthetic oligonucleotide
gaatgttctgtttcagttga

SEQ ID NO: 1280 - DNA, 20 bp, Artificial sequence
  Synthetic oligonucleotide
tgaatgttctgtttcagttg

SEQ ID NO: 1281 - DNA, 20 bp, Artificial sequence
  Synthetic oligonucleotide
atgaatgttctgtttcagtt

SEQ ID NO: 1282 - DNA, 20 bp, Artificial sequence
  Synthetic oligonucleotide
aatgaatgttctgtttcagt

SEQ ID NO: 1283 - DNA, 20 bp, Artificial sequence
  Synthetic oligonucleotide
aaatgaatgttctgtttcag

SEQ ID NO: 1284 - DNA, 20 bp, Artificial sequence
  Synthetic oligonucleotide
taaatgaatgttctgtttca

SEQ ID NO: 1285 - DNA, 20 bp, Artificial sequence
  Synthetic oligonucleotide
ttaaatgaatgttctgtttc

SEQ ID NO: 1286 - DNA, 20 bp, Artificial sequence
  Synthetic oligonucleotide
caggtctaacataattttta

SEQ ID NO: 1287 - DNA, 20 bp, Artificial sequence
  Synthetic oligonucleotide
ccaggtctaacataattttt

SEQ ID NO: 1288 - DNA, 20 bp, Artificial sequence
  Synthetic oligonucleotide
accaggtctaacataatttt

SEQ ID NO: 1289 - DNA, 20 bp, Artificial sequence
  Synthetic oligonucleotide
gaccaggtctaacataattt

SEQ ID NO: 1290 - DNA, 20 bp, Artificial sequence
  Synthetic oligonucleotide
ggaccaggtctaacataatt

SEQ ID NO: 1291 - DNA, 20 bp, Artificial sequence
  Synthetic oligonucleotide
gggaccaggtctaacataat

SEQ ID NO: 1292 - DNA, 20 bp, Artificial sequence
  Synthetic oligonucleotide
tgggaccaggtctaacataa

SEQ ID NO: 1293 - DNA, 20 bp, Artificial sequence
  Synthetic oligonucleotide
gtgggaccaggtctaacata

SEQ ID NO: 1294 - DNA, 20 bp, Artificial sequence
  Synthetic oligonucleotide
tgtgggaccaggtctaacat

SEQ ID NO: 1295 - DNA, 20 bp, Artificial sequence
  Synthetic oligonucleotide
gtgtgggaccaggtctaaca

SEQ ID NO: 1296 - DNA, 20 bp, Artificial sequence
  Synthetic oligonucleotide
acgtgtgggaccaggtctaa

SEQ ID NO: 1297 - DNA, 20 bp, Artificial sequence
  Synthetic oligonucleotide
tttcttgggcacgtgtggga

SEQ ID NO: 1298 - DNA, 20 bp, Artificial sequence
  Synthetic oligonucleotide
tgtttcttgggcacgtgtgg

SEQ ID NO: 1299 - DNA, 20 bp, Artificial sequence
  Synthetic oligonucleotide
atgtttcttgggcacgtgtg

SEQ ID NO: 1300 - DNA, 20 bp, Artificial sequence
  Synthetic oligonucleotide
aatgtttcttgggcacgtgt

SEQ ID NO: 1301 - DNA, 20 bp, Artificial sequence
  Synthetic oligonucleotide
aaatgtttcttgggcacgtg

SEQ ID NO: 1302 - DNA, 20 bp, Artificial sequence
  Synthetic oligonucleotide
caaatgtttcttgggcacgt

SEQ ID NO: 1303 - DNA, 20 bp, Artificial sequence
  Synthetic oligonucleotide
ctatttccaaatgtttcttg

SEQ ID NO: 1304 - DNA, 20 bp, Artificial sequence
  Synthetic oligonucleotide
tctatttccaaatgtttctt

SEQ ID NO: 1305 - DNA, 20 bp, Artificial sequence
  Synthetic oligonucleotide
ttctatttccaaatgtttct

SEQ ID NO: 1306 - DNA, 20 bp, Artificial sequence
  Synthetic oligonucleotide
gttctatttccaaatgtttc

SEQ ID NO: 1307 - DNA, 20 bp, Artificial sequence
  Synthetic oligonucleotide
tgttctatttccaaatgttt

SEQ ID NO: 1308 - DNA, 20 bp, Artificial sequence
  Synthetic oligonucleotide
gtgttctatttccaaatgtt

SEQ ID NO: 1309 - DNA, 20 bp, Artificial sequence
  Synthetic oligonucleotide
cgtgttctatttccaaatgt

SEQ ID NO: 1310 - DNA, 20 bp, Artificial sequence
  Synthetic oligonucleotide
acgtgttctatttccaaatg

SEQ ID NO: 1311 - DNA, 20 bp, Artificial sequence
  Synthetic oligonucleotide
gacgtgttctatttccaaat

SEQ ID NO: 1312 - DNA, 20 bp, Artificial sequence
  Synthetic oligonucleotide
tgacgtgttctatttccaaa

SEQ ID NO: 1313 - DNA, 20 bp, Artificial sequence
  Synthetic oligonucleotide
atgacgtgttctatttccaa

SEQ ID NO: 1314 - DNA, 20 bp, Artificial sequence
  Synthetic oligonucleotide
aatgacgtgttctatttcca

SEQ ID NO: 1315 - DNA, 20 bp, Artificial sequence
  Synthetic oligonucleotide
gaatgacgtgttctatttcc

SEQ ID NO: 1316 - DNA, 20 bp, Artificial sequence
  Synthetic oligonucleotide
tgaatgacgtgttctatttc

SEQ ID NO: 1317 - DNA, 20 bp, Artificial sequence
  Synthetic oligonucleotide
ctgaatgacgtgttctattt

SEQ ID NO: 1318 - DNA, 20 bp, Artificial sequence
  Synthetic oligonucleotide
actgaatgacgtgttctatt

SEQ ID NO: 1319 - DNA, 20 bp, Artificial sequence
  Synthetic oligonucleotide
aactgaatgacgtgttctat

SEQ ID NO: 1320 - DNA, 20 bp, Artificial sequence
  Synthetic oligonucleotide
caactgaatgacgtgttcta

SEQ ID NO: 1321 - DNA, 20 bp, Artificial sequence
  Synthetic oligonucleotide
tcaactgaatgacgtgttct

SEQ ID NO: 1322 - DNA, 20 bp, Artificial sequence
  Synthetic oligonucleotide
ttcaactgaatgacgtgttc

SEQ ID NO: 1323 - DNA, 20 bp, Artificial sequence
  Synthetic oligonucleotide
tttcaactgaatgacgtgtt

SEQ ID NO: 1324 - DNA, 20 bp, Artificial sequence
  Synthetic oligonucleotide
gtttcaactgaatgacgtgt

SEQ ID NO: 1325 - DNA, 20 bp, Artificial sequence
  Synthetic oligonucleotide
agtttcaactgaatgacgtg

SEQ ID NO: 1326 - DNA, 20 bp, Artificial sequence
  Synthetic oligonucleotide
ttgatgtctggagtttcaac

SEQ ID NO: 1327 - DNA, 20 bp, Artificial sequence
  Synthetic oligonucleotide
tttgatgtctggagtttcaa

SEQ ID NO: 1328 - DNA, 20 bp, Artificial sequence
  Synthetic oligonucleotide
ctttgatgtctggagtttca

SEQ ID NO: 1329 - DNA, 20 bp, Artificial sequence
  Synthetic oligonucleotide
tctttgatgtctggagtttc

SEQ ID NO: 1330 - DNA, 20 bp, Artificial sequence
  Synthetic oligonucleotide
atctttgatgtctggagttt

SEQ ID NO: 1331 - DNA, 20 bp, Artificial sequence
  Synthetic oligonucleotide
aatctttgatgtctggagtt

SEQ ID NO: 1332 - DNA, 20 bp, Artificial sequence
  Synthetic oligonucleotide
aaatctttgatgtctggagt

SEQ ID NO: 1333 - DNA, 20 bp, Artificial sequence
  Synthetic oligonucleotide
taaatctttgatgtctggag

SEQ ID NO: 1334 - DNA, 20 bp, Artificial sequence
  Synthetic oligonucleotide
ctaaatctttgatgtctgga

SEQ ID NO: 1335 - DNA, 20 bp, Artificial sequence
  Synthetic oligonucleotide
gctaaatctttgatgtctgg

SEQ ID NO: 1336 - DNA, 20 bp, Artificial sequence
  Synthetic oligonucleotide
ggctaaatctttgatgtctg

SEQ ID NO: 1337 - DNA, 20 bp, Artificial sequence
  Synthetic oligonucleotide
tggctaaatctttgatgtct

SEQ ID NO: 1338 - DNA, 20 bp, Artificial sequence
  Synthetic oligonucleotide
ctggctaaatctttgatgtc

SEQ ID NO: 1339 - DNA, 20 bp, Artificial sequence
  Synthetic oligonucleotide
gctggctaaatctttgatgt

SEQ ID NO: 1340 - DNA, 20 bp, Artificial sequence
  Synthetic oligonucleotide
tgctggctaaatctttgatg

SEQ ID NO: 1341 - DNA, 20 bp, Artificial sequence
  Synthetic oligonucleotide
gtgctggctaaatctttgat

SEQ ID NO: 1342 - DNA, 20 bp, Artificial sequence
  Synthetic oligonucleotide
agtgctggctaaatctttga

SEQ ID NO: 1343 - DNA, 20 bp, Artificial sequence
  Synthetic oligonucleotide
aagtgctggctaaatctttg

SEQ ID NO: 1344 - DNA, 20 bp, Artificial sequence
  Synthetic oligonucleotide
aaagtgctggctaaatcttt

SEQ ID NO: 1345 - DNA, 20 bp, Artificial sequence
  Synthetic oligonucleotide
taaagtgctggctaaatctt

SEQ ID NO: 1346 - DNA, 20 bp, Artificial sequence
  Synthetic oligonucleotide
ttaaagtgctggctaaatct

SEQ ID NO: 1347 - DNA, 20 bp, Artificial sequence
  Synthetic oligonucleotide
cttaaagtgctggctaaatc

SEQ ID NO: 1348 - DNA, 20 bp, Artificial sequence
  Synthetic oligonucleotide
acttaaagtgctggctaaat

SEQ ID NO: 1349 - DNA, 20 bp, Artificial sequence
  Synthetic oligonucleotide
tacttaaagtgctggctaaa

SEQ ID NO: 1350 - DNA, 20 bp, Artificial sequence
  Synthetic oligonucleotide
ttacttaaagtgctggctaa

SEQ ID NO: 1351 - DNA, 20 bp, Artificial sequence
  Synthetic oligonucleotide
tttacttaaagtgctggcta

SEQ ID NO: 1352 - DNA, 20 bp, Artificial sequence
  Synthetic oligonucleotide
ctttacttaaagtgctggct

SEQ ID NO: 1353 - DNA, 20 bp, Artificial sequence
  Synthetic oligonucleotide
gaccagattctttacttaaa

SEQ ID NO: 1354 - DNA, 20 bp, Artificial sequence
  Synthetic oligonucleotide
tgaccagattctttacttaa

SEQ ID NO: 1355 - DNA, 20 bp, Artificial sequence
  Synthetic oligonucleotide
ttgaccagattctttactta

SEQ ID NO: 1356 - DNA, 20 bp, Artificial sequence
  Synthetic oligonucleotide
attgaccagattctttactt

SEQ ID NO: 1357 - DNA, 20 bp, Artificial sequence
  Synthetic oligonucleotide
aattgaccagattctttact

SEQ ID NO: 1358 - DNA, 20 bp, Artificial sequence
  Synthetic oligonucleotide
caattgaccagattctttac

SEQ ID NO: 1359 - DNA, 20 bp, Artificial sequence
  Synthetic oligonucleotide
gcaattgaccagattcttta

SEQ ID NO: 1360 - DNA, 20 bp, Artificial sequence
  Synthetic oligonucleotide
ggcaattgaccagattcttt

SEQ ID NO: 1361 - DNA, 20 bp, Artificial sequence
  Synthetic oligonucleotide
atattcgttctgcaattttt

SEQ ID NO: 1362 - DNA, 20 bp, Artificial sequence
  Synthetic oligonucleotide
tatattcgttctgcaatttt

SEQ ID NO: 1363 - DNA, 20 bp, Artificial sequence
  Synthetic oligonucleotide
ttatattcgttctgcaattt

SEQ ID NO: 1364 - DNA, 20 bp, Artificial sequence
  Synthetic oligonucleotide
cttatattcgttctgcaatt

SEQ ID NO: 1365 - DNA, 20 bp, Artificial sequence
  Synthetic oligonucleotide
acttatattcgttctgcaat

SEQ ID NO: 1366 - DNA, 20 bp, Artificial sequence
  Synthetic oligonucleotide
aacttatattcgttctgcaa

SEQ ID NO: 1367 - DNA, 20 bp, Artificial sequence
  Synthetic oligonucleotide
taacttatattcgttctgca

SEQ ID NO: 1368 - DNA, 20 bp, Artificial sequence
  Synthetic oligonucleotide
ataacttatattcgttctgc

SEQ ID NO: 1369 - DNA, 20 bp, Artificial sequence
  Synthetic oligonucleotide
cataacttatattcgttctg

SEQ ID NO: 1370 - DNA, 20 bp, Artificial sequence
  Synthetic oligonucleotide
ccataacttatattcgttct

SEQ ID NO: 1371 - DNA, 20 bp, Artificial sequence
  Synthetic oligonucleotide
cccataacttatattcgttc

SEQ ID NO: 1372 - DNA, 20 bp, Artificial sequence
  Synthetic oligonucleotide
gcccataacttatattcgtt

SEQ ID NO: 1373 - DNA, 20 bp, Artificial sequence
  Synthetic oligonucleotide
agcccataacttatattcgt

SEQ ID NO: 1374 - DNA, 20 bp, Artificial sequence
  Synthetic oligonucleotide
tagcccataacttatattcg

SEQ ID NO: 1375 - DNA, 20 bp, Artificial sequence
  Synthetic oligonucleotide
ctagcccataacttatattc

SEQ ID NO: 1376 - DNA, 20 bp, Artificial sequence
  Synthetic oligonucleotide
tctagcccataacttatatt

SEQ ID NO: 1377 - DNA, 20 bp, Artificial sequence
  Synthetic oligonucleotide
ctctagcccataacttatat

SEQ ID NO: 1378 - DNA, 20 bp, Artificial sequence
  Synthetic oligonucleotide
tctctagcccataacttata

SEQ ID NO: 1379 - DNA, 20 bp, Artificial sequence
  Synthetic oligonucleotide
ttctctagcccataacttat

SEQ ID NO: 1380 - DNA, 20 bp, Artificial sequence
  Synthetic oligonucleotide
attctctagcccataactta

SEQ ID NO: 1381 - DNA, 20 bp, Artificial sequence
  Synthetic oligonucleotide
cattctctagcccataactt

SEQ ID NO: 1382 - DNA, 20 bp, Artificial sequence
  Synthetic oligonucleotide
tcattctctagcccataact

SEQ ID NO: 1383 - DNA, 20 bp, Artificial sequence
  Synthetic oligonucleotide
ttcattctctagcccataac

SEQ ID NO: 1384 - DNA, 20 bp, Artificial sequence
  Synthetic oligonucleotide
gttcattctctagcccataa

SEQ ID NO: 1385 - DNA, 20 bp, Artificial sequence
  Synthetic oligonucleotide
ggttcattctctagcccata

SEQ ID NO: 1386 - DNA, 20 bp, Artificial sequence
  Synthetic oligonucleotide
aggttcattctctagcccat

SEQ ID NO: 1387 - DNA, 20 bp, Artificial sequence
  Synthetic oligonucleotide
taggttcattctctagccca

SEQ ID NO: 1388 - DNA, 20 bp, Artificial sequence
  Synthetic oligonucleotide
gtaggttcattctctagccc

SEQ ID NO: 1389 - DNA, 20 bp, Artificial sequence
  Synthetic oligonucleotide
tgtaggttcattctctagcc

SEQ ID NO: 1390 - DNA, 20 bp, Artificial sequence
  Synthetic oligonucleotide
ctgtaggttcattctctagc

SEQ ID NO: 1391 - DNA, 20 bp, Artificial sequence
  Synthetic oligonucleotide
gctgtaggttcattctctag

SEQ ID NO: 1392 - DNA, 20 bp, Artificial sequence
  Synthetic oligonucleotide
tgctgtaggttcattctcta

SEQ ID NO: 1393 - DNA, 20 bp, Artificial sequence
  Synthetic oligonucleotide
ttgctgtaggttcattctct

SEQ ID NO: 1394 - DNA, 20 bp, Artificial sequence
  Synthetic oligonucleotide
gttgctgtaggttcattctc

SEQ ID NO: 1395 - DNA, 20 bp, Artificial sequence
  Synthetic oligonucleotide
agttgctgtaggttcattct

SEQ ID NO: 1396 - DNA, 20 bp, Artificial sequence
  Synthetic oligonucleotide
aagttgctgtaggttcattc

SEQ ID NO: 1397 - DNA, 20 bp, Artificial sequence
  Synthetic oligonucleotide
taagttgctgtaggttcatt

SEQ ID NO: 1398 - DNA, 20 bp, Artificial sequence
  Synthetic oligonucleotide
ataagttgctgtaggttcat

SEQ ID NO: 1399 - DNA, 20 bp, Artificial sequence
  Synthetic oligonucleotide
tataagttgctgtaggttca

SEQ ID NO: 1400 - DNA, 20 bp, Artificial sequence
  Synthetic oligonucleotide
gtataagttgctgtaggttc

SEQ ID NO: 1401 - DNA, 20 bp, Artificial sequence
  Synthetic oligonucleotide
tgtataagttgctgtaggtt

SEQ ID NO: 1402 - DNA, 20 bp, Artificial sequence
  Synthetic oligonucleotide
ttgtataagttgctgtaggt

SEQ ID NO: 1403 - DNA, 20 bp, Artificial sequence
  Synthetic oligonucleotide
attgtataagttgctgtagg

SEQ ID NO: 1404 - DNA, 20 bp, Artificial sequence
  Synthetic oligonucleotide
cattgtataagttgctgtag

SEQ ID NO: 1405 - DNA, 20 bp, Artificial sequence
  Synthetic oligonucleotide
acattgtataagttgctgta

SEQ ID NO: 1406 - DNA, 20 bp, Artificial sequence
  Synthetic oligonucleotide
aacattgtataagttgctgt

SEQ ID NO: 1407 - DNA, 20 bp, Artificial sequence
  Synthetic oligonucleotide
aaacattgtataagttgctg

SEQ ID NO: 1408 - DNA, 20 bp, Artificial sequence
  Synthetic oligonucleotide
aaaacattgtataagttgct

SEQ ID NO: 1409 - DNA, 20 bp, Artificial sequence
  Synthetic oligonucleotide
gaaaacattgtataagttgc

SEQ ID NO: 1410 - DNA, 20 bp, Artificial sequence
  Synthetic oligonucleotide
agaaaacattgtataagttg

SEQ ID NO: 1411 - DNA, 20 bp, Artificial sequence
  Synthetic oligonucleotide
cagaaaacattgtataagtt

SEQ ID NO: 1412 - DNA, 20 bp, Artificial sequence
  Synthetic oligonucleotide
gcagaaaacattgtataagt

SEQ ID NO: 1413 - DNA, 20 bp, Artificial sequence
  Synthetic oligonucleotide
agcagaaaacattgtataag

SEQ ID NO: 1414 - DNA, 20 bp, Artificial sequence
  Synthetic oligonucleotide
aagcagaaaacattgtataa

SEQ ID NO: 1415 - DNA, 20 bp, Artificial sequence
  Synthetic oligonucleotide
aaagcagaaaacattgtata

SEQ ID NO: 1416 - DNA, 20 bp, Artificial sequence
  Synthetic oligonucleotide
aaaagcagaaaacattgtat

SEQ ID NO: 1417 - DNA, 20 bp, Artificial sequence
  Synthetic oligonucleotide
gaaaagcagaaaacattgta

SEQ ID NO: 1418 - DNA, 20 bp, Artificial sequence
  Synthetic oligonucleotide
tgaaaagcagaaaacattgt

SEQ ID NO: 1419 - DNA, 20 bp, Artificial sequence
  Synthetic oligonucleotide
tgctaccttcctgaaaagca

SEQ ID NO: 1420 - DNA, 20 bp, Artificial sequence
  Synthetic oligonucleotide
ttgctaccttcctgaaaagc

SEQ ID NO: 1421 - DNA, 20 bp, Artificial sequence
  Synthetic oligonucleotide
tttgctaccttcctgaaaag

SEQ ID NO: 1422 - DNA, 20 bp, Artificial sequence
  Synthetic oligonucleotide
ttttgctaccttcctgaaaa

SEQ ID NO: 1423 - DNA, 20 bp, Artificial sequence
  Synthetic oligonucleotide
tttttgctaccttcctgaaa

SEQ ID NO: 1424 - DNA, 20 bp, Artificial sequence
  Synthetic oligonucleotide
gcaatctgtttgtgattttt

SEQ ID NO: 1425 - DNA, 20 bp, Artificial sequence
  Synthetic oligonucleotide
tgcaatctgtttgtgatttt

SEQ ID NO: 1426 - DNA, 20 bp, Artificial sequence
  Synthetic oligonucleotide
atgcaatctgtttgtgattt

SEQ ID NO: 1427 - DNA, 20 bp, Artificial sequence
  Synthetic oligonucleotide
tatgcaatctgtttgtgatt

SEQ ID NO: 1428 - DNA, 20 bp, Artificial sequence
  Synthetic oligonucleotide
atatgcaatctgtttgtgat

SEQ ID NO: 1429 - DNA, 20 bp, Artificial sequence
  Synthetic oligonucleotide
aatatgcaatctgtttgtga

SEQ ID NO: 1430 - DNA, 20 bp, Artificial sequence
  Synthetic oligonucleotide
taatatgcaatctgtttgtg

SEQ ID NO: 1431 - DNA, 20 bp, Artificial sequence
  Synthetic oligonucleotide
ataatatgcaatctgtttgt

SEQ ID NO: 1432 - DNA, 20 bp, Artificial sequence
  Synthetic oligonucleotide
agataatatgcaatctgttt

SEQ ID NO: 1433 - DNA, 20 bp, Artificial sequence
  Synthetic oligonucleotide
tatcagataatatgcaatct

SEQ ID NO: 1434 - DNA, 20 bp, Artificial sequence
  Synthetic oligonucleotide
gtatcagataatatgcaatc

SEQ ID NO: 1435 - DNA, 20 bp, Artificial sequence
  Synthetic oligonucleotide
tgtatcagataatatgcaat

SEQ ID NO: 1436 - DNA, 20 bp, Artificial sequence
  Synthetic oligonucleotide
atgtatcagataatatgcaa

SEQ ID NO: 1437 - DNA, 20 bp, Artificial sequence
  Synthetic oligonucleotide
gatgtatcagataatatgca

SEQ ID NO: 1438 - DNA, 20 bp, Artificial sequence
  Synthetic oligonucleotide
ggatgtatcagataatatgc

SEQ ID NO: 1439 - DNA, 20 bp, Artificial sequence
  Synthetic oligonucleotide
gggatgtatcagataatatg

SEQ ID NO: 1440 - DNA, 20 bp, Artificial sequence
  Synthetic oligonucleotide
gaaacgtgtctataccaggg

SEQ ID NO: 1441 - DNA, 20 bp, Artificial sequence
  Synthetic oligonucleotide
ggaaacgtgtctataccagg

SEQ ID NO: 1442 - DNA, 20 bp, Artificial sequence
  Synthetic oligonucleotide
tggaaacgtgtctataccag

SEQ ID NO: 1443 - DNA, 20 bp, Artificial sequence
  Synthetic oligonucleotide
ttggaaacgtgtctatacca

SEQ ID NO: 1444 - DNA, 20 bp, Artificial sequence
  Synthetic oligonucleotide
attggaaacgtgtctatacc

SEQ ID NO: 1445 - DNA, 20 bp, Artificial sequence
  Synthetic oligonucleotide
cattggaaacgtgtctatac

SEQ ID NO: 1446 - DNA, 20 bp, Artificial sequence
  Synthetic oligonucleotide
tcattggaaacgtgtctata

SEQ ID NO: 1447 - DNA, 20 bp, Artificial sequence
  Synthetic oligonucleotide
atcattggaaacgtgtctat

SEQ ID NO: 1448 - DNA, 20 bp, Artificial sequence
  Synthetic oligonucleotide
tatcattggaaacgtgtcta

SEQ ID NO: 1449 - DNA, 20 bp, Artificial sequence
  Synthetic oligonucleotide
ctatcattggaaacgtgtct

SEQ ID NO: 1450 - DNA, 20 bp, Artificial sequence
  Synthetic oligonucleotide
actatcattggaaacgtgtc

SEQ ID NO: 1451 - DNA, 20 bp, Artificial sequence
  Synthetic oligonucleotide
tactatcattggaaacgtgt

SEQ ID NO: 1452 - DNA, 20 bp, Artificial sequence
  Synthetic oligonucleotide
ctactatcattggaaacgtg

SEQ ID NO: 1453 - DNA, 20 bp, Artificial sequence
  Synthetic oligonucleotide
cctactatcattggaaacgt

SEQ ID NO: 1454 - DNA, 20 bp, Artificial sequence
  Synthetic oligonucleotide
tcctactatcattggaaacg

SEQ ID NO: 1455 - DNA, 20 bp, Artificial sequence
  Synthetic oligonucleotide
ttcctactatcattggaaac

SEQ ID NO: 1456 - DNA, 20 bp, Artificial sequence
  Synthetic oligonucleotide
ttttcctactatcattggaa

SEQ ID NO: 1457 - DNA, 20 bp, Artificial sequence
  Synthetic oligonucleotide
gttttcctactatcattgga

SEQ ID NO: 1458 - DNA, 20 bp, Artificial sequence
  Synthetic oligonucleotide
tgttttcctactatcattgg

SEQ ID NO: 1459 - DNA, 20 bp, Artificial sequence
  Synthetic oligonucleotide
ctgttttcctactatcattg

SEQ ID NO: 1460 - DNA, 20 bp, Artificial sequence
  Synthetic oligonucleotide
tctgttttcctactatcatt

SEQ ID NO: 1461 - DNA, 20 bp, Artificial sequence
  Synthetic oligonucleotide
atctgttttcctactatcat

SEQ ID NO: 1462 - DNA, 20 bp, Artificial sequence
  Synthetic oligonucleotide
tatctgttttcctactatca

SEQ ID NO: 1463 - DNA, 20 bp, Artificial sequence
  Synthetic oligonucleotide
ttatctgttttcctactatc

SEQ ID NO: 1464 - DNA, 20 bp, Artificial sequence
  Synthetic oligonucleotide
tttatctgttttcctactat

SEQ ID NO: 1465 - DNA, 20 bp, Artificial sequence
  Synthetic oligonucleotide
atttatctgttttcctacta

SEQ ID NO: 1466 - DNA, 20 bp, Artificial sequence
  Synthetic oligonucleotide
aatttatctgttttcctact

SEQ ID NO: 1467 - DNA, 20 bp, Artificial sequence
  Synthetic oligonucleotide
taatttatctgttttcctac

SEQ ID NO: 1468 - DNA, 20 bp, Artificial sequence
  Synthetic oligonucleotide
gaaaccaattaatttatctg

SEQ ID NO: 1469 - DNA, 20 bp, Artificial sequence
  Synthetic oligonucleotide
gagaaaccaattaatttatc

SEQ ID NO: 1470 - DNA, 20 bp, Artificial sequence
  Synthetic oligonucleotide
ggacgattggtttggagaaa

SEQ ID NO: 1471 - DNA, 20 bp, Artificial sequence
  Synthetic oligonucleotide
cggacgattggtttggagaa

SEQ ID NO: 1472 - DNA, 20 bp, Artificial sequence
  Synthetic oligonucleotide
acggacgattggtttggaga

SEQ ID NO: 1473 - DNA, 20 bp, Artificial sequence
  Synthetic oligonucleotide
tacggacgattggtttggag

SEQ ID NO: 1474 - DNA, 20 bp, Artificial sequence
  Synthetic oligonucleotide
ttacggacgattggtttgga

SEQ ID NO: 1475 - DNA, 20 bp, Artificial sequence
  Synthetic oligonucleotide
cttacggacgattggtttgg

SEQ ID NO: 1476 - DNA, 20 bp, Artificial sequence
  Synthetic oligonucleotide
tcttacggacgattggtttg

SEQ ID NO: 1477 - DNA, 20 bp, Artificial sequence
  Synthetic oligonucleotide
ttcttacggacgattggttt

SEQ ID NO: 1478 - DNA, 20 bp, Artificial sequence
  Synthetic oligonucleotide
cttcttacggacgattggtt

SEQ ID NO: 1479 - DNA, 20 bp, Artificial sequence
  Synthetic oligonucleotide
gcttcttacggacgattggt

SEQ ID NO: 1480 - DNA, 20 bp, Artificial sequence
  Synthetic oligonucleotide
agcttcttacggacgattgg

SEQ ID NO: 1481 - DNA, 20 bp, Artificial sequence
  Synthetic oligonucleotide
tagcttcttacggacgattg

SEQ ID NO: 1482 - DNA, 20 bp, Artificial sequence
  Synthetic oligonucleotide
ttagcttcttacggacgatt

SEQ ID NO: 1483 - DNA, 20 bp, Artificial sequence
  Synthetic oligonucleotide
cttagcttcttacggacgat

SEQ ID NO: 1484 - DNA, 20 bp, Artificial sequence
  Synthetic oligonucleotide
gcttagcttcttacggacga

SEQ ID NO: 1485 - DNA, 20 bp, Artificial sequence
  Synthetic oligonucleotide
agcttagcttcttacggacg

SEQ ID NO: 1486 - DNA, 20 bp, Artificial sequence
  Synthetic oligonucleotide
gctgtgaactcaagcttagc

SEQ ID NO: 1487 - DNA, 20 bp, Artificial sequence
  Synthetic oligonucleotide
agctgtgaactcaagcttag

SEQ ID NO: 1488 - DNA, 20 bp, Artificial sequence
  Synthetic oligonucleotide
tagctgtgaactcaagctta

SEQ ID NO: 1489 - DNA, 20 bp, Artificial sequence
  Synthetic oligonucleotide
ctagctgtgaactcaagctt

SEQ ID NO: 1490 - DNA, 20 bp, Artificial sequence
  Synthetic oligonucleotide
tcctagctgtgaactcaagc

SEQ ID NO: 1491 - DNA, 20 bp, Artificial sequence
  Synthetic oligonucleotide
atcctagctgtgaactcaag

SEQ ID NO: 1492 - DNA, 20 bp, Artificial sequence
  Synthetic oligonucleotide
gatcctagctgtgaactcaa

SEQ ID NO: 1493 - DNA, 20 bp, Artificial sequence
  Synthetic oligonucleotide
agatcctagctgtgaactca

SEQ ID NO: 1494 - DNA, 20 bp, Artificial sequence
  Synthetic oligonucleotide
aagatcctagctgtgaactc

SEQ ID NO: 1495 - DNA, 20 bp, Artificial sequence
  Synthetic oligonucleotide
aaagatcctagctgtgaact

SEQ ID NO: 1496 - DNA, 20 bp, Artificial sequence
  Synthetic oligonucleotide
taaagatcctagctgtgaac

SEQ ID NO: 1497 - DNA, 20 bp, Artificial sequence
  Synthetic oligonucleotide
ctaaagatcctagctgtgaa

SEQ ID NO: 1498 - DNA, 20 bp, Artificial sequence
  Synthetic oligonucleotide
tctaaagatcctagctgtga

SEQ ID NO: 1499 - DNA, 20 bp, Artificial sequence
  Synthetic oligonucleotide
ctctaaagatcctagctgtg

SEQ ID NO: 1500 - DNA, 20 bp, Artificial sequence
  Synthetic oligonucleotide
tctctaaagatcctagctgt

SEQ ID NO: 1501 - DNA, 20 bp, Artificial sequence
  Synthetic oligonucleotide
ttctctaaagatcctagctg

SEQ ID NO: 1502 - DNA, 20 bp, Artificial sequence
  Synthetic oligonucleotide
cttctctaaagatcctagct

SEQ ID NO: 1503 - DNA, 20 bp, Artificial sequence
  Synthetic oligonucleotide
acttctctaaagatcctagc

SEQ ID NO: 1504 - DNA, 20 bp, Artificial sequence
  Synthetic oligonucleotide
aacttctctaaagatcctag

SEQ ID NO: 1505 - DNA, 20 bp, Artificial sequence
  Synthetic oligonucleotide
aaacttctctaaagatccta

SEQ ID NO: 1506 - DNA, 20 bp, Artificial sequence
  Synthetic oligonucleotide
taaacttctctaaagatcct

SEQ ID NO: 1507 - DNA, 20 bp, Artificial sequence
  Synthetic oligonucleotide
ttaaacttctctaaagatcc

SEQ ID NO: 1508 - DNA, 20 bp, Artificial sequence
  Synthetic oligonucleotide
cttaaacttctctaaagatc

SEQ ID NO: 1509 - DNA, 20 bp, Artificial sequence
  Synthetic oligonucleotide
tcttaaacttctctaaagat

SEQ ID NO: 1510 - DNA, 20 bp, Artificial sequence
  Synthetic oligonucleotide
ctcttaaacttctctaaaga

SEQ ID NO: 1511 - DNA, 20 bp, Artificial sequence
  Synthetic oligonucleotide
cctcttaaacttctctaaag

SEQ ID NO: 1512 - DNA, 20 bp, Artificial sequence
  Synthetic oligonucleotide
gcctcttaaacttctctaaa

SEQ ID NO: 1513 - DNA, 20 bp, Artificial sequence
  Synthetic oligonucleotide
tgcctcttaaacttctctaa

SEQ ID NO: 1514 - DNA, 20 bp, Artificial sequence
  Synthetic oligonucleotide
ttgcctcttaaacttctcta

SEQ ID NO: 1515 - DNA, 20 bp, Artificial sequence
  Synthetic oligonucleotide
attgcctcttaaacttctct

SEQ ID NO: 1516 - DNA, 20 bp, Artificial sequence
  Synthetic oligonucleotide
tattgcctcttaaacttctc

SEQ ID NO: 1517 - DNA, 20 bp, Artificial sequence
  Synthetic oligonucleotide
atattgcctcttaaacttct

SEQ ID NO: 1518 - DNA, 20 bp, Artificial sequence
  Synthetic oligonucleotide
catattgcctcttaaacttc

SEQ ID NO: 1519 - DNA, 20 bp, Artificial sequence
  Synthetic oligonucleotide
ccatattgcctcttaaactt

SEQ ID NO: 1520 - DNA, 20 bp, Artificial sequence
  Synthetic oligonucleotide
cccatattgcctcttaaact

SEQ ID NO: 1521 - DNA, 20 bp, Artificial sequence
  Synthetic oligonucleotide
tcccatattgcctcttaaac

SEQ ID NO: 1522 - DNA, 20 bp, Artificial sequence
  Synthetic oligonucleotide
ttcccatattgcctcttaaa

SEQ ID NO: 1523 - DNA, 20 bp, Artificial sequence
  Synthetic oligonucleotide
cttcccatattgcctcttaa

SEQ ID NO: 1524 - DNA, 20 bp, Artificial sequence
  Synthetic oligonucleotide
ccttcccatattgcctctta

SEQ ID NO: 1525 - DNA, 20 bp, Artificial sequence
  Synthetic oligonucleotide
accttcccatattgcctctt

SEQ ID NO: 1526 - DNA, 20 bp, Artificial sequence
  Synthetic oligonucleotide
aaccttcccatattgcctct

SEQ ID NO: 1527 - DNA, 20 bp, Artificial sequence
  Synthetic oligonucleotide
caaccttcccatattgcctc

SEQ ID NO: 1528 - DNA, 20 bp, Artificial sequence
  Synthetic oligonucleotide
tcaaccttcccatattgcct

SEQ ID NO: 1529 - DNA, 20 bp, Artificial sequence
  Synthetic oligonucleotide
ttcaaccttcccatattgcc

SEQ ID NO: 1530 - DNA, 20 bp, Artificial sequence
  Synthetic oligonucleotide
tttcaaccttcccatattgc

SEQ ID NO: 1531 - DNA, 20 bp, Artificial sequence
  Synthetic oligonucleotide
ttttcaaccttcccatattg

SEQ ID NO: 1532 - DNA, 20 bp, Artificial sequence
  Synthetic oligonucleotide
attttcaaccttcccatatt

SEQ ID NO: 1533 - DNA, 20 bp, Artificial sequence
  Synthetic oligonucleotide
gattttcaaccttcccatat

SEQ ID NO: 1534 - DNA, 20 bp, Artificial sequence
  Synthetic oligonucleotide
ggattttcaaccttcccata

SEQ ID NO: 1535 - DNA, 20 bp, Artificial sequence
  Synthetic oligonucleotide
aggattttcaaccttcccat

SEQ ID NO: 1536 - DNA, 20 bp, Artificial sequence
  Synthetic oligonucleotide
gaggattttcaaccttccca

SEQ ID NO: 1537 - DNA, 20 bp, Artificial sequence
  Synthetic oligonucleotide
agaggattttcaaccttccc

SEQ ID NO: 1538 - DNA, 20 bp, Artificial sequence
  Synthetic oligonucleotide
cagaggattttcaaccttcc

SEQ ID NO: 1539 - DNA, 20 bp, Artificial sequence
  Synthetic oligonucleotide
ccagaggattttcaaccttc

SEQ ID NO: 1540 - DNA, 20 bp, Artificial sequence
  Synthetic oligonucleotide
tccagaggattttcaacctt

SEQ ID NO: 1541 - DNA, 20 bp, Artificial sequence
  Synthetic oligonucleotide
atccagaggattttcaacct

SEQ ID NO: 1542 - DNA, 20 bp, Artificial sequence
  Synthetic oligonucleotide
tatccagaggattttcaacc

SEQ ID NO: 1543 - DNA, 20 bp, Artificial sequence
  Synthetic oligonucleotide
gtatccagaggattttcaac

SEQ ID NO: 1544 - DNA, 20 bp, Artificial sequence
  Synthetic oligonucleotide
tgtatccagaggattttcaa

SEQ ID NO: 1545 - DNA, 20 bp, Artificial sequence
  Synthetic oligonucleotide
ctgtatccagaggattttca

SEQ ID NO: 1546 - DNA, 20 bp, Artificial sequence
  Synthetic oligonucleotide
ttcctctacttctgtatcca

SEQ ID NO: 1547 - DNA, 20 bp, Artificial sequence
  Synthetic oligonucleotide
tttcctctacttctgtatcc

SEQ ID NO: 1548 - DNA, 20 bp, Artificial sequence
  Synthetic oligonucleotide
ctttcctctacttctgtatc

SEQ ID NO: 1549 - DNA, 20 bp, Artificial sequence
  Synthetic oligonucleotide
actttcctctacttctgtat

SEQ ID NO: 1550 - DNA, 20 bp, Artificial sequence
  Synthetic oligonucleotide
tactttcctctacttctgta

SEQ ID NO: 1551 - DNA, 20 bp, Artificial sequence
  Synthetic oligonucleotide
ttactttcctctacttctgt

SEQ ID NO: 1552 - DNA, 20 bp, Artificial sequence
  Synthetic oligonucleotide
attactttcctctacttctg

SEQ ID NO: 1553 - DNA, 20 bp, Artificial sequence
  Synthetic oligonucleotide
cattactttcctctacttct

SEQ ID NO: 1554 - DNA, 20 bp, Artificial sequence
  Synthetic oligonucleotide
ccattactttcctctacttc

SEQ ID NO: 1555 - DNA, 20 bp, Artificial sequence
  Synthetic oligonucleotide
tccattactttcctctactt

SEQ ID NO: 1556 - DNA, 20 bp, Artificial sequence
  Synthetic oligonucleotide
ctccattactttcctctact

SEQ ID NO: 1557 - DNA, 20 bp, Artificial sequence
  Synthetic oligonucleotide
actccattactttcctctac

SEQ ID NO: 1558 - DNA, 20 bp, Artificial sequence
  Synthetic oligonucleotide
gactccattactttcctcta

SEQ ID NO: 1559 - DNA, 20 bp, Artificial sequence
  Synthetic oligonucleotide
tgactccattactttcctct

SEQ ID NO: 1560 - DNA, 20 bp, Artificial sequence
  Synthetic oligonucleotide
gtgactccattactttcctc

SEQ ID NO: 1561 - DNA, 20 bp, Artificial sequence
  Synthetic oligonucleotide
agtgactccattactttcct

SEQ ID NO: 1562 - DNA, 20 bp, Artificial sequence
  Synthetic oligonucleotide
tagtgactccattactttcc

SEQ ID NO: 1563 - DNA, 20 bp, Artificial sequence
  Synthetic oligonucleotide
gtagtgactccattactttc

SEQ ID NO: 1564 - DNA, 20 bp, Artificial sequence
  Synthetic oligonucleotide
ggtagtgactccattacttt

SEQ ID NO: 1565 - DNA, 20 bp, Artificial sequence
  Synthetic oligonucleotide
tggtagtgactccattactt

SEQ ID NO: 1566 - DNA, 20 bp, Artificial sequence
  Synthetic oligonucleotide
ttggtagtgactccattact

SEQ ID NO: 1567 - DNA, 20 bp, Artificial sequence
  Synthetic oligonucleotide
attggtagtgactccattac

SEQ ID NO: 1568 - DNA, 20 bp, Artificial sequence
  Synthetic oligonucleotide
gattggtagtgactccatta

SEQ ID NO: 1569 - DNA, 20 bp, Artificial sequence
  Synthetic oligonucleotide
agattggtagtgactccatt

SEQ ID NO: 1570 - DNA, 20 bp, Artificial sequence
  Synthetic oligonucleotide
gagattggtagtgactccat

SEQ ID NO: 1571 - DNA, 20 bp, Artificial sequence
  Synthetic oligonucleotide
tgagattggtagtgactcca

SEQ ID NO: 1572 - DNA, 20 bp, Artificial sequence
  Synthetic oligonucleotide
ctgagattggtagtgactcc

SEQ ID NO: 1573 - DNA, 20 bp, Artificial sequence
  Synthetic oligonucleotide
actgagattggtagtgactc

SEQ ID NO: 1574 - DNA, 20 bp, Artificial sequence
  Synthetic oligonucleotide
gactgagattggtagtgact

SEQ ID NO: 1575 - DNA, 20 bp, Artificial sequence
  Synthetic oligonucleotide
agactgagattggtagtgac

SEQ ID NO: 1576 - DNA, 20 bp, Artificial sequence
  Synthetic oligonucleotide
aagactgagattggtagtga

SEQ ID NO: 1577 - DNA, 20 bp, Artificial sequence
  Synthetic oligonucleotide
gaagactgagattggtagtg

SEQ ID NO: 1578 - DNA, 20 bp, Artificial sequence
  Synthetic oligonucleotide
tgaagactgagattggtagt

SEQ ID NO: 1579 - DNA, 20 bp, Artificial sequence
  Synthetic oligonucleotide
ttgaagactgagattggtag

SEQ ID NO: 1580 - DNA, 20 bp, Artificial sequence
  Synthetic oligonucleotide
cttgaagactgagattggta

SEQ ID NO: 1581 - DNA, 20 bp, Artificial sequence
  Synthetic oligonucleotide
acttgaagactgagattggt

SEQ ID NO: 1582 - DNA, 20 bp, Artificial sequence
  Synthetic oligonucleotide
aacttgaagactgagattgg

SEQ ID NO: 1583 - DNA, 20 bp, Artificial sequence
  Synthetic oligonucleotide
caacttgaagactgagattg

SEQ ID NO: 1584 - DNA, 20 bp, Artificial sequence
  Synthetic oligonucleotide
tcaacttgaagactgagatt

SEQ ID NO: 1585 - DNA, 20 bp, Artificial sequence
  Synthetic oligonucleotide
ttcaacttgaagactgagat

SEQ ID NO: 1586 - DNA, 20 bp, Artificial sequence
  Synthetic oligonucleotide
gttcaacttgaagactgaga

SEQ ID NO: 1587 - DNA, 20 bp, Artificial sequence
  Synthetic oligonucleotide
ggttcaacttgaagactgag

SEQ ID NO: 1588 - DNA, 20 bp, Artificial sequence
  Synthetic oligonucleotide
aggttcaacttgaagactga

SEQ ID NO: 1589 - DNA, 20 bp, Artificial sequence
  Synthetic oligonucleotide
caggttcaacttgaagactg

SEQ ID NO: 1590 - DNA, 20 bp, Artificial sequence
  Synthetic oligonucleotide
tcaggttcaacttgaagact

SEQ ID NO: 1591 - DNA, 20 bp, Artificial sequence
  Synthetic oligonucleotide
gtcaggttcaacttgaagac

SEQ ID NO: 1592 - DNA, 20 bp, Artificial sequence
  Synthetic oligonucleotide
tgtcaggttcaacttgaaga

SEQ ID NO: 1593 - DNA, 20 bp, Artificial sequence
  Synthetic oligonucleotide
atgtcaggttcaacttgaag

SEQ ID NO: 1594 - DNA, 20 bp, Artificial sequence
  Synthetic oligonucleotide
aatgtcaggttcaacttgaa

SEQ ID NO: 1595 - DNA, 20 bp, Artificial sequence
  Synthetic oligonucleotide
gaatgtcaggttcaacttga

SEQ ID NO: 1596 - DNA, 20 bp, Artificial sequence
  Synthetic oligonucleotide
agaatgtcaggttcaacttg

SEQ ID NO: 1597 - DNA, 20 bp, Artificial sequence
  Synthetic oligonucleotide
cagaatgtcaggttcaactt

SEQ ID NO: 1598 - DNA, 20 bp, Artificial sequence
  Synthetic oligonucleotide
ttcttgtccttcagcagaat

SEQ ID NO: 1599 - DNA, 20 bp, Artificial sequence
  Synthetic oligonucleotide
gttcttgtccttcagcagaa

SEQ ID NO: 1600 - DNA, 20 bp, Artificial sequence
  Synthetic oligonucleotide
ggttcttgtccttcagcaga

SEQ ID NO: 1601 - DNA, 20 bp, Artificial sequence
  Synthetic oligonucleotide
cggttcttgtccttcagcag

SEQ ID NO: 1602 - DNA, 20 bp, Artificial sequence
  Synthetic oligonucleotide
gcggttcttgtccttcagca

SEQ ID NO: 1603 - DNA, 20 bp, Artificial sequence
  Synthetic oligonucleotide
agcggttcttgtccttcagc

SEQ ID NO: 1604 - DNA, 20 bp, Artificial sequence
  Synthetic oligonucleotide
aagcggttcttgtccttcag

SEQ ID NO: 1605 - DNA, 20 bp, Artificial sequence
  Synthetic oligonucleotide
taagcggttcttgtccttca

SEQ ID NO: 1606 - DNA, 20 bp, Artificial sequence
  Synthetic oligonucleotide
ctaagcggttcttgtccttc

SEQ ID NO: 1607 - DNA, 20 bp, Artificial sequence
  Synthetic oligonucleotide
tctaagcggttcttgtcctt

SEQ ID NO: 1608 - DNA, 20 bp, Artificial sequence
  Synthetic oligonucleotide
ctctaagcggttcttgtcct

SEQ ID NO: 1609 - DNA, 20 bp, Artificial sequence
  Synthetic oligonucleotide
tctctaagcggttcttgtcc

SEQ ID NO: 1610 - DNA, 20 bp, Artificial sequence
  Synthetic oligonucleotide
ttctctaagcggttcttgtc

SEQ ID NO: 1611 - DNA, 20 bp, Artificial sequence
  Synthetic oligonucleotide
gttctctaagcggttcttgt

SEQ ID NO: 1612 - DNA, 20 bp, Artificial sequence
  Synthetic oligonucleotide
agttctctaagcggttcttg

SEQ ID NO: 1613 - DNA, 20 bp, Artificial sequence
  Synthetic oligonucleotide
agagttctctaagcggttct

SEQ ID NO: 1614 - DNA, 20 bp, Artificial sequence
  Synthetic oligonucleotide
cagagttctctaagcggttc

SEQ ID NO: 1615 - DNA, 20 bp, Artificial sequence
  Synthetic oligonucleotide
tcagagttctctaagcggtt

SEQ ID NO: 1616 - DNA, 20 bp, Artificial sequence
  Synthetic oligonucleotide
atcagagttctctaagcggt

SEQ ID NO: 1617 - DNA, 20 bp, Artificial sequence
  Synthetic oligonucleotide
catcagagttctctaagcgg

SEQ ID NO: 1618 - DNA, 20 bp, Artificial sequence
  Synthetic oligonucleotide
acatcagagttctctaagcg

SEQ ID NO: 1619 - DNA, 20 bp, Artificial sequence
  Synthetic oligonucleotide
aacatcagagttctctaagc

SEQ ID NO: 1620 - DNA, 20 bp, Artificial sequence
  Synthetic oligonucleotide
aaacatcagagttctctaag

SEQ ID NO: 1621 - DNA, 20 bp, Artificial sequence
  Synthetic oligonucleotide
caaacatcagagttctctaa

SEQ ID NO: 1622 - DNA, 20 bp, Artificial sequence
  Synthetic oligonucleotide
acaaacatcagagttctcta

SEQ ID NO: 1623 - DNA, 20 bp, Artificial sequence
  Synthetic oligonucleotide
tacaaacatcagagttctct

SEQ ID NO: 1624 - DNA, 20 bp, Artificial sequence
  Synthetic oligonucleotide
ttacaaacatcagagttctc

SEQ ID NO: 1625 - DNA, 20 bp, Artificial sequence
  Synthetic oligonucleotide
tttacaaacatcagagttct

SEQ ID NO: 1626 - DNA, 20 bp, Artificial sequence
  Synthetic oligonucleotide
ttttacaaacatcagagttc

SEQ ID NO: 1627 - DNA, 20 bp, Artificial sequence
  Synthetic oligonucleotide
attttacaaacatcagagtt

SEQ ID NO: 1628 - DNA, 20 bp, Artificial sequence
  Synthetic oligonucleotide
gattttacaaacatcagagt

SEQ ID NO: 1629 - DNA, 20 bp, Artificial sequence
  Synthetic oligonucleotide
tgattttacaaacatcagag

SEQ ID NO: 1630 - DNA, 20 bp, Artificial sequence
  Synthetic oligonucleotide
gtgattttacaaacatcaga

SEQ ID NO: 1631 - DNA, 20 bp, Artificial sequence
  Synthetic oligonucleotide
agtgattttacaaacatcag

SEQ ID NO: 1632 - DNA, 20 bp, Artificial sequence
  Synthetic oligonucleotide
tagtgattttacaaacatca

SEQ ID NO: 1633 - DNA, 20 bp, Artificial sequence
  Synthetic oligonucleotide
gtagtgattttacaaacatc

SEQ ID NO: 1634 - DNA, 20 bp, Artificial sequence
  Synthetic oligonucleotide
agtagtgattttacaaacat

SEQ ID NO: 1635 - DNA, 20 bp, Artificial sequence
  Synthetic oligonucleotide
tagtagtgattttacaaaca

SEQ ID NO: 1636 - DNA, 20 bp, Artificial sequence
  Synthetic oligonucleotide
atagtagtgattttacaaac

SEQ ID NO: 1637 - DNA, 20 bp, Artificial sequence
  Synthetic oligonucleotide
catagtagtgattttacaaa

SEQ ID NO: 1638 - DNA, 20 bp, Artificial sequence
  Synthetic oligonucleotide
ccatagtagtgattttacaa

SEQ ID NO: 1639 - DNA, 20 bp, Artificial sequence
  Synthetic oligonucleotide
tccatagtagtgattttaca

SEQ ID NO: 1640 - DNA, 20 bp, Artificial sequence
  Synthetic oligonucleotide
ctccatagtagtgattttac

SEQ ID NO: 1641 - DNA, 20 bp, Artificial sequence
  Synthetic oligonucleotide
gctccatagtagtgatttta

SEQ ID NO: 1642 - DNA, 20 bp, Artificial sequence
  Synthetic oligonucleotide
tgctccatagtagtgatttt

SEQ ID NO: 1643 - DNA, 20 bp, Artificial sequence
  Synthetic oligonucleotide
atgctccatagtagtgattt

SEQ ID NO: 1644 - DNA, 20 bp, Artificial sequence
  Synthetic oligonucleotide
tatgctccatagtagtgatt

SEQ ID NO: 1645 - DNA, 20 bp, Artificial sequence
  Synthetic oligonucleotide
ctatgctccatagtagtgat

SEQ ID NO: 1646 - DNA, 20 bp, Artificial sequence
  Synthetic oligonucleotide
ctgaatcactatgctccata

SEQ ID NO: 1647 - DNA, 20 bp, Artificial sequence
  Synthetic oligonucleotide
tctgaatcactatgctccat

SEQ ID NO: 1648 - DNA, 20 bp, Artificial sequence
  Synthetic oligonucleotide
atctgaatcactatgctcca

SEQ ID NO: 1649 - DNA, 20 bp, Artificial sequence
  Synthetic oligonucleotide
tatctgaatcactatgctcc

SEQ ID NO: 1650 - DNA, 20 bp, Artificial sequence
  Synthetic oligonucleotide
ctatctgaatcactatgctc

SEQ ID NO: 1651 - DNA, 20 bp, Artificial sequence
  Synthetic oligonucleotide
actatctgaatcactatgct

SEQ ID NO: 1652 - DNA, 20 bp, Artificial sequence
  Synthetic oligonucleotide
tactatctgaatcactatgc

SEQ ID NO: 1653 - DNA, 20 bp, Artificial sequence
  Synthetic oligonucleotide
ctactatctgaatcactatg

SEQ ID NO: 1654 - DNA, 20 bp, Artificial sequence
  Synthetic oligonucleotide
actactatctgaatcactat

SEQ ID NO: 1655 - DNA, 20 bp, Artificial sequence
  Synthetic oligonucleotide
aactactatctgaatcacta

SEQ ID NO: 1656 - DNA, 20 bp, Artificial sequence
  Synthetic oligonucleotide
caactactatctgaatcact

SEQ ID NO: 1657 - DNA, 20 bp, Artificial sequence
  Synthetic oligonucleotide
acaactactatctgaatcac

SEQ ID NO: 1658 - DNA, 20 bp, Artificial sequence
  Synthetic oligonucleotide
gacaactactatctgaatca

SEQ ID NO: 1659 - DNA, 20 bp, Artificial sequence
  Synthetic oligonucleotide
tgacaactactatctgaatc

SEQ ID NO: 1660 - DNA, 20 bp, Artificial sequence
  Synthetic oligonucleotide
ttgacaactactatctgaat

SEQ ID NO: 1661 - DNA, 20 bp, Artificial sequence
  Synthetic oligonucleotide
gttgacaactactatctgaa

SEQ ID NO: 1662 - DNA, 20 bp, Artificial sequence
  Synthetic oligonucleotide
ggttgacaactactatctga

SEQ ID NO: 1663 - DNA, 20 bp, Artificial sequence
  Synthetic oligonucleotide
tggttgacaactactatctg

SEQ ID NO: 1664 - DNA, 20 bp, Artificial sequence
  Synthetic oligonucleotide
ctggttgacaactactatct

SEQ ID NO: 1665 - DNA, 20 bp, Artificial sequence
  Synthetic oligonucleotide
gctggttgacaactactatc

SEQ ID NO: 1666 - DNA, 20 bp, Artificial sequence
  Synthetic oligonucleotide
tgctggttgacaactactat

SEQ ID NO: 1667 - DNA, 20 bp, Artificial sequence
  Synthetic oligonucleotide
ttgctggttgacaactacta

SEQ ID NO: 1668 - DNA, 20 bp, Artificial sequence
  Synthetic oligonucleotide
cttgctggttgacaactact

SEQ ID NO: 1669 - DNA, 20 bp, Artificial sequence
  Synthetic oligonucleotide
gcttgctggttgacaactac

SEQ ID NO: 1670 - DNA, 20 bp, Artificial sequence
  Synthetic oligonucleotide
ggcttgctggttgacaacta

SEQ ID NO: 1671 - DNA, 20 bp, Artificial sequence
  Synthetic oligonucleotide
tggcttgctggttgacaact

SEQ ID NO: 1672 - DNA, 20 bp, Artificial sequence
  Synthetic oligonucleotide
gtggcttgctggttgacaac

SEQ ID NO: 1673 - DNA, 20 bp, Artificial sequence
  Synthetic oligonucleotide
tgtggcttgctggttgacaa

SEQ ID NO: 1674 - DNA, 20 bp, Artificial sequence
  Synthetic oligonucleotide
atgtggcttgctggttgaca

SEQ ID NO: 1675 - DNA, 20 bp, Artificial sequence
  Synthetic oligonucleotide
gatgtggcttgctggttgac

SEQ ID NO: 1676 - DNA, 20 bp, Artificial sequence
  Synthetic oligonucleotide
ggatgtggcttgctggttga

SEQ ID NO: 1677 - DNA, 20 bp, Artificial sequence
  Synthetic oligonucleotide
aggatgtggcttgctggttg

SEQ ID NO: 1678 - DNA, 20 bp, Artificial sequence
  Synthetic oligonucleotide
aaggatgtggcttgctggtt

SEQ ID NO: 1679 - DNA, 20 bp, Artificial sequence
  Synthetic oligonucleotide
taaggatgtggcttgctggt

SEQ ID NO: 1680 - DNA, 20 bp, Artificial sequence
  Synthetic oligonucleotide
ttaaggatgtggcttgctgg

SEQ ID NO: 1681 - DNA, 20 bp, Artificial sequence
  Synthetic oligonucleotide
gttaaggatgtggcttgctg

SEQ ID NO: 1682 - DNA, 20 bp, Artificial sequence
  Synthetic oligonucleotide
agttaaggatgtggcttgct

SEQ ID NO: 1683 - DNA, 20 bp, Artificial sequence
  Synthetic oligonucleotide
gagttaaggatgtggcttgc

SEQ ID NO: 1684 - DNA, 20 bp, Artificial sequence
  Synthetic oligonucleotide
tgagttaaggatgtggcttg

SEQ ID NO: 1685 - DNA, 20 bp, Artificial sequence
  Synthetic oligonucleotide
ctgagttaaggatgtggctt

SEQ ID NO: 1686 - DNA, 20 bp, Artificial sequence
  Synthetic oligonucleotide
tctgagttaaggatgtggct

SEQ ID NO: 1687 - DNA, 20 bp, Artificial sequence
  Synthetic oligonucleotide
ctctgagttaaggatgtggc

SEQ ID NO: 1688 - DNA, 20 bp, Artificial sequence
  Synthetic oligonucleotide
tctctgagttaaggatgtgg

SEQ ID NO: 1689 - DNA, 20 bp, Artificial sequence
  Synthetic oligonucleotide
ttctctgagttaaggatgtg

SEQ ID NO: 1690 - DNA, 20 bp, Artificial sequence
  Synthetic oligonucleotide
cttctctgagttaaggatgt

SEQ ID NO: 1691 - DNA, 20 bp, Artificial sequence
  Synthetic oligonucleotide
acttctctgagttaaggatg

SEQ ID NO: 1692 - DNA, 20 bp, Artificial sequence
  Synthetic oligonucleotide
aacttctctgagttaaggat

SEQ ID NO: 1693 - DNA, 20 bp, Artificial sequence
  Synthetic oligonucleotide
aaacttctctgagttaagga

SEQ ID NO: 1694 - DNA, 20 bp, Artificial sequence
  Synthetic oligonucleotide
gaaacttctctgagttaagg

SEQ ID NO: 1695 - DNA, 20 bp, Artificial sequence
  Synthetic oligonucleotide
ggaaacttctctgagttaag

SEQ ID NO: 1696 - DNA, 20 bp, Artificial sequence
  Synthetic oligonucleotide
tggaaacttctctgagttaa

SEQ ID NO: 1697 - DNA, 20 bp, Artificial sequence
  Synthetic oligonucleotide
atggaaacttctctgagtta

SEQ ID NO: 1698 - DNA, 20 bp, Artificial sequence
  Synthetic oligonucleotide
gaatggaaacttctctgagt

SEQ ID NO: 1699 - DNA, 20 bp, Artificial sequence
  Synthetic oligonucleotide
agaatggaaacttctctgag

SEQ ID NO: 1700 - DNA, 20 bp, Artificial sequence
  Synthetic oligonucleotide
cttggagaatggaaacttct

SEQ ID NO: 1701 - DNA, 20 bp, Artificial sequence
  Synthetic oligonucleotide
ccttggagaatggaaacttc

SEQ ID NO: 1702 - DNA, 20 bp, Artificial sequence
  Synthetic oligonucleotide
tccttggagaatggaaactt

SEQ ID NO: 1703 - DNA, 20 bp, Artificial sequence
  Synthetic oligonucleotide
atccttggagaatggaaact

SEQ ID NO: 1704 - DNA, 20 bp, Artificial sequence
  Synthetic oligonucleotide
catccttggagaatggaaac

SEQ ID NO: 1705 - DNA, 20 bp, Artificial sequence
  Synthetic oligonucleotide
tcatccttggagaatggaaa

SEQ ID NO: 1706 - DNA, 20 bp, Artificial sequence
  Synthetic oligonucleotide
ttcatccttggagaatggaa

SEQ ID NO: 1707 - DNA, 20 bp, Artificial sequence
  Synthetic oligonucleotide
cttcatccttggagaatgga

SEQ ID NO: 1708 - DNA, 20 bp, Artificial sequence
  Synthetic oligonucleotide
tcttcatccttggagaatgg

SEQ ID NO: 1709 - DNA, 20 bp, Artificial sequence
  Synthetic oligonucleotide
atcttcatccttggagaatg

SEQ ID NO: 1710 - DNA, 20 bp, Artificial sequence
  Synthetic oligonucleotide
aatcttcatccttggagaat

SEQ ID NO: 1711 - DNA, 20 bp, Artificial sequence
  Synthetic oligonucleotide
caatcttcatccttggagaa

SEQ ID NO: 1712 - DNA, 20 bp, Artificial sequence
  Synthetic oligonucleotide
aacaatcttcatccttggag

SEQ ID NO: 1713 - DNA, 20 bp, Artificial sequence
  Synthetic oligonucleotide
aaacaatcttcatccttgga

SEQ ID NO: 1714 - DNA, 20 bp, Artificial sequence
  Synthetic oligonucleotide
taaacaatcttcatccttgg

SEQ ID NO: 1715 - DNA, 20 bp, Artificial sequence
  Synthetic oligonucleotide
ctaaacaatcttcatccttg

SEQ ID NO: 1716 - DNA, 20 bp, Artificial sequence
  Synthetic oligonucleotide
tctaaacaatcttcatcctt

SEQ ID NO: 1717 - DNA, 20 bp, Artificial sequence
  Synthetic oligonucleotide
ttctaaacaatcttcatcct

SEQ ID NO: 1718 - DNA, 20 bp, Artificial sequence
  Synthetic oligonucleotide
gttctaaacaatcttcatcc

SEQ ID NO: 1719 - DNA, 20 bp, Artificial sequence
  Synthetic oligonucleotide
tgttctaaacaatcttcatc

SEQ ID NO: 1720 - DNA, 20 bp, Artificial sequence
  Synthetic oligonucleotide
aggcatctgttgttctaaac

SEQ ID NO: 1721 - DNA, 20 bp, Artificial sequence
  Synthetic oligonucleotide
taggcatctgttgttctaaa

SEQ ID NO: 1722 - DNA, 20 bp, Artificial sequence
  Synthetic oligonucleotide
ctaggcatctgttgttctaa

SEQ ID NO: 1723 - DNA, 20 bp, Artificial sequence
  Synthetic oligonucleotide
actaggcatctgttgttcta

SEQ ID NO: 1724 - DNA, 20 bp, Artificial sequence
  Synthetic oligonucleotide
aactaggcatctgttgttct

SEQ ID NO: 1725 - DNA, 20 bp, Artificial sequence
  Synthetic oligonucleotide
aaactaggcatctgttgttc

SEQ ID NO: 1726 - DNA, 20 bp, Artificial sequence
  Synthetic oligonucleotide
caaactaggcatctgttgtt

SEQ ID NO: 1727 - DNA, 20 bp, Artificial sequence
  Synthetic oligonucleotide
tcaaactaggcatctgttgt

SEQ ID NO: 1728 - DNA, 20 bp, Artificial sequence
  Synthetic oligonucleotide
ctcaaactaggcatctgttg

SEQ ID NO: 1729 - DNA, 20 bp, Artificial sequence
  Synthetic oligonucleotide
tctcaaactaggcatctgtt

SEQ ID NO: 1730 - DNA, 20 bp, Artificial sequence
  Synthetic oligonucleotide
ctctcaaactaggcatctgt

SEQ ID NO: 1731 - DNA, 20 bp, Artificial sequence
  Synthetic oligonucleotide
tctctcaaactaggcatctg

SEQ ID NO: 1732 - DNA, 20 bp, Artificial sequence
  Synthetic oligonucleotide
ttctctcaaactaggcatct

SEQ ID NO: 1733 - DNA, 20 bp, Artificial sequence
  Synthetic oligonucleotide
tttctctcaaactaggcatc

SEQ ID NO: 1734 - DNA, 20 bp, Artificial sequence
  Synthetic oligonucleotide
ctttctctcaaactaggcat

SEQ ID NO: 1735 - DNA, 20 bp, Artificial sequence
  Synthetic oligonucleotide
actttctctcaaactaggca

SEQ ID NO: 1736 - DNA, 20 bp, Artificial sequence
  Synthetic oligonucleotide
gactttctctcaaactaggc

SEQ ID NO: 1737 - DNA, 20 bp, Artificial sequence
  Synthetic oligonucleotide
ggactttctctcaaactagg

SEQ ID NO: 1738 - DNA, 20 bp, Artificial sequence
  Synthetic oligonucleotide
aggactttctctcaaactag

SEQ ID NO: 1739 - DNA, 20 bp, Artificial sequence
  Synthetic oligonucleotide
taggactttctctcaaacta

SEQ ID NO: 1740 - DNA, 20 bp, Artificial sequence
  Synthetic oligonucleotide
ataggactttctctcaaact

SEQ ID NO: 1741 - DNA, 20 bp, Artificial sequence
  Synthetic oligonucleotide
cataggactttctctcaaac

SEQ ID NO: 1742 - DNA, 20 bp, Artificial sequence
  Synthetic oligonucleotide
tcataggactttctctcaaa

SEQ ID NO: 1743 - DNA, 20 bp, Artificial sequence
  Synthetic oligonucleotide
actccttcagggtcatagga

SEQ ID NO: 1744 - DNA, 20 bp, Artificial sequence
  Synthetic oligonucleotide
aactccttcagggtcatagg

SEQ ID NO: 1745 - DNA, 20 bp, Artificial sequence
  Synthetic oligonucleotide
taactccttcagggtcatag

SEQ ID NO: 1746 - DNA, 20 bp, Artificial sequence
  Synthetic oligonucleotide
ataactccttcagggtcata

SEQ ID NO: 1747 - DNA, 20 bp, Artificial sequence
  Synthetic oligonucleotide
gataactccttcagggtcat

SEQ ID NO: 1748 - DNA, 20 bp, Artificial sequence
  Synthetic oligonucleotide
agataactccttcagggtca

SEQ ID NO: 1749 - DNA, 20 bp, Artificial sequence
  Synthetic oligonucleotide
gagataactccttcagggtc

SEQ ID NO: 1750 - DNA, 20 bp, Artificial sequence
  Synthetic oligonucleotide
tctattaaagagagataact

SEQ ID NO: 1751 - DNA, 20 bp, Artificial sequence
  Synthetic oligonucleotide
ttctattaaagagagataac

SEQ ID NO: 1752 - DNA, 20 bp, Artificial sequence
  Synthetic oligonucleotide
gttttctattaaagagagat

SEQ ID NO: 1753 - DNA, 20 bp, Artificial sequence
  Synthetic oligonucleotide
ggttttctattaaagagaga

SEQ ID NO: 1754 - DNA, 20 bp, Artificial sequence
  Synthetic oligonucleotide
aggttttctattaaagagag

SEQ ID NO: 1755 - DNA, 20 bp, Artificial sequence
  Synthetic oligonucleotide
aaggttttctattaaagaga

SEQ ID NO: 1756 - DNA, 20 bp, Artificial sequence
  Synthetic oligonucleotide
aaaggttttctattaaagag

SEQ ID NO: 1757 - DNA, 20 bp, Artificial sequence
  Synthetic oligonucleotide
caaaggttttctattaaaga

SEQ ID NO: 1758 - DNA, 20 bp, Artificial sequence
  Synthetic oligonucleotide
ccaaaggttttctattaaag

SEQ ID NO: 1759 - DNA, 20 bp, Artificial sequence
  Synthetic oligonucleotide
tccaaaggttttctattaaa

SEQ ID NO: 1760 - DNA, 20 bp, Artificial sequence
  Synthetic oligonucleotide
gtccaaaggttttctattaa

SEQ ID NO: 1761 - DNA, 20 bp, Artificial sequence
  Synthetic oligonucleotide
ggtccaaaggttttctatta

SEQ ID NO: 1762 - DNA, 20 bp, Artificial sequence
  Synthetic oligonucleotide
aggtccaaaggttttctatt

SEQ ID NO: 1763 - DNA, 20 bp, Artificial sequence
  Synthetic oligonucleotide
aaggtccaaaggttttctat

SEQ ID NO: 1764 - DNA, 20 bp, Artificial sequence
  Synthetic oligonucleotide
caaggtccaaaggttttcta

SEQ ID NO: 1765 - DNA, 20 bp, Artificial sequence
  Synthetic oligonucleotide
tcaaggtccaaaggttttct

SEQ ID NO: 1766 - DNA, 20 bp, Artificial sequence
  Synthetic oligonucleotide
ctcaaggtccaaaggttttc

SEQ ID NO: 1767 - DNA, 20 bp, Artificial sequence
  Synthetic oligonucleotide
tctcaaggtccaaaggtttt

SEQ ID NO: 1768 - DNA, 20 bp, Artificial sequence
  Synthetic oligonucleotide
ttctcaaggtccaaaggttt

SEQ ID NO: 1769 - DNA, 20 bp, Artificial sequence
  Synthetic oligonucleotide
cttctcaaggtccaaaggtt

SEQ ID NO: 1770 - DNA, 20 bp, Artificial sequence
  Synthetic oligonucleotide
acttctcaaggtccaaaggt

SEQ ID NO: 1771 - DNA, 20 bp, Artificial sequence
  Synthetic oligonucleotide
gacttctcaaggtccaaagg

SEQ ID NO: 1772 - DNA, 20 bp, Artificial sequence
  Synthetic oligonucleotide
tgacttctcaaggtccaaag

SEQ ID NO: 1773 - DNA, 20 bp, Artificial sequence
  Synthetic oligonucleotide
atgacttctcaaggtccaaa

SEQ ID NO: 1774 - DNA, 20 bp, Artificial sequence
  Synthetic oligonucleotide
gatgacttctcaaggtccaa

SEQ ID NO: 1775 - DNA, 20 bp, Artificial sequence
  Synthetic oligonucleotide
agatgacttctcaaggtcca

SEQ ID NO: 1776 - DNA, 20 bp, Artificial sequence
  Synthetic oligonucleotide
cagatgacttctcaaggtcc

SEQ ID NO: 1777 - DNA, 20 bp, Artificial sequence
  Synthetic oligonucleotide
tcagatgacttctcaaggtc

SEQ ID NO: 1778 - DNA, 20 bp, Artificial sequence
  Synthetic oligonucleotide
ttcagatgacttctcaaggt

SEQ ID NO: 1779 - DNA, 20 bp, Artificial sequence
  Synthetic oligonucleotide
attcagatgacttctcaagg

SEQ ID NO: 1780 - DNA, 20 bp, Artificial sequence
  Synthetic oligonucleotide
gattcagatgacttctcaag

SEQ ID NO: 1781 - DNA, 20 bp, Artificial sequence
  Synthetic oligonucleotide
tgattcagatgacttctcaa

SEQ ID NO: 1782 - DNA, 20 bp, Artificial sequence
  Synthetic oligonucleotide
gtgattcagatgacttctca

SEQ ID NO: 1783 - DNA, 20 bp, Artificial sequence
  Synthetic oligonucleotide
agtgattcagatgacttctc

SEQ ID NO: 1784 - DNA, 20 bp, Artificial sequence
  Synthetic oligonucleotide
tagtgattcagatgacttct

SEQ ID NO: 1785 - DNA, 20 bp, Artificial sequence
  Synthetic oligonucleotide
ctagtgattcagatgacttc

SEQ ID NO: 1786 - DNA, 20 bp, Artificial sequence
  Synthetic oligonucleotide
gctagtgattcagatgactt

SEQ ID NO: 1787 - DNA, 20 bp, Artificial sequence
  Synthetic oligonucleotide
ggctagtgattcagatgact

SEQ ID NO: 1788 - DNA, 20 bp, Artificial sequence
  Synthetic oligonucleotide
aggctagtgattcagatgac

SEQ ID NO: 1789 - DNA, 20 bp, Artificial sequence
  Synthetic oligonucleotide
gaggctagtgattcagatga

SEQ ID NO: 1790 - DNA, 20 bp, Artificial sequence
  Synthetic oligonucleotide
agaggctagtgattcagatg

SEQ ID NO: 1791 - DNA, 20 bp, Artificial sequence
  Synthetic oligonucleotide
tagaggctagtgattcagat

SEQ ID NO: 1792 - DNA, 20 bp, Artificial sequence
  Synthetic oligonucleotide
ttagaggctagtgattcaga

SEQ ID NO: 1793 - DNA, 20 bp, Artificial sequence
  Synthetic oligonucleotide
tttagaggctagtgattcag

SEQ ID NO: 1794 - DNA, 20 bp, Artificial sequence
  Synthetic oligonucleotide
atttagaggctagtgattca

SEQ ID NO: 1795 - DNA, 20 bp, Artificial sequence
  Synthetic oligonucleotide
aatttagaggctagtgattc

SEQ ID NO: 1796 - DNA, 20 bp, Artificial sequence
  Synthetic oligonucleotide
taatttagaggctagtgatt

SEQ ID NO: 1797 - DNA, 20 bp, Artificial sequence
  Synthetic oligonucleotide
ataatttagaggctagtgat

SEQ ID NO: 1798 - DNA, 20 bp, Artificial sequence
  Synthetic oligonucleotide
gataatttagaggctagtga

SEQ ID NO: 1799 - DNA, 20 bp, Artificial sequence
  Synthetic oligonucleotide
ggataatttagaggctagtg

SEQ ID NO: 1800 - DNA, 20 bp, Artificial sequence
  Synthetic oligonucleotide
tggataatttagaggctagt

SEQ ID NO: 1801 - DNA, 20 bp, Artificial sequence
  Synthetic oligonucleotide
ctggataatttagaggctag

SEQ ID NO: 1802 - DNA, 20 bp, Artificial sequence
  Synthetic oligonucleotide
tctggataatttagaggcta

SEQ ID NO: 1803 - DNA, 20 bp, Artificial sequence
  Synthetic oligonucleotide
gtctggataatttagaggct

SEQ ID NO: 1804 - DNA, 20 bp, Artificial sequence
  Synthetic oligonucleotide
agtctggataatttagaggc

SEQ ID NO: 1805 - DNA, 20 bp, Artificial sequence
  Synthetic oligonucleotide
cagtctggataatttagagg

SEQ ID NO: 1806 - DNA, 20 bp, Artificial sequence
  Synthetic oligonucleotide
tcagtctggataatttagag

SEQ ID NO: 1807 - DNA, 20 bp, Artificial sequence
  Synthetic oligonucleotide
ttcagtctggataatttaga

SEQ ID NO: 1808 - DNA, 20 bp, Artificial sequence
  Synthetic oligonucleotide
cttcagtctggataatttag

SEQ ID NO: 1809 - DNA, 20 bp, Artificial sequence
  Synthetic oligonucleotide
ccttcagtctggataattta

SEQ ID NO: 1810 - DNA, 20 bp, Artificial sequence
  Synthetic oligonucleotide
cccttcagtctggataattt

SEQ ID NO: 1811 - DNA, 20 bp, Artificial sequence
  Synthetic oligonucleotide
acccttcagtctggataatt

SEQ ID NO: 1812 - DNA, 20 bp, Artificial sequence
  Synthetic oligonucleotide
aacccttcagtctggataat

SEQ ID NO: 1813 - DNA, 20 bp, Artificial sequence
  Synthetic oligonucleotide
gaacccttcagtctggataa

SEQ ID NO: 1814 - DNA, 20 bp, Artificial sequence
  Synthetic oligonucleotide
ggaacccttcagtctggata

SEQ ID NO: 1815 - DNA, 20 bp, Artificial sequence
  Synthetic oligonucleotide
cggaacccttcagtctggat

SEQ ID NO: 1816 - DNA, 20 bp, Artificial sequence
  Synthetic oligonucleotide
tcggaacccttcagtctgga

SEQ ID NO: 1817 - DNA, 20 bp, Artificial sequence
  Synthetic oligonucleotide
ttcggaacccttcagtctgg

SEQ ID NO: 1818 - DNA, 20 bp, Artificial sequence
  Synthetic oligonucleotide
tttcggaacccttcagtctg

SEQ ID NO: 1819 - DNA, 20 bp, Artificial sequence
  Synthetic oligonucleotide
ctttcggaacccttcagtct

SEQ ID NO: 1820 - DNA, 20 bp, Artificial sequence
  Synthetic oligonucleotide
tctttcggaacccttcagtc

SEQ ID NO: 1821 - DNA, 20 bp, Artificial sequence
  Synthetic oligonucleotide
ctctttcggaacccttcagt

SEQ ID NO: 1822 - DNA, 20 bp, Artificial sequence
  Synthetic oligonucleotide
tctctttcggaacccttcag

SEQ ID NO: 1823 - DNA, 20 bp, Artificial sequence
  Synthetic oligonucleotide
ttctctttcggaacccttca

SEQ ID NO: 1824 - DNA, 20 bp, Artificial sequence
  Synthetic oligonucleotide
tttctctttcggaacccttc

SEQ ID NO: 1825 - DNA, 20 bp, Artificial sequence
  Synthetic oligonucleotide
gtttctctttcggaaccctt

SEQ ID NO: 1826 - DNA, 20 bp, Artificial sequence
  Synthetic oligonucleotide
agtttctctttcggaaccct

SEQ ID NO: 1827 - DNA, 20 bp, Artificial sequence
  Synthetic oligonucleotide
gagtttctctttcggaaccc

SEQ ID NO: 1828 - DNA, 20 bp, Artificial sequence
  Synthetic oligonucleotide
tgagtttctctttcggaacc

SEQ ID NO: 1829 - DNA, 20 bp, Artificial sequence
  Synthetic oligonucleotide
ttgagtttctctttcggaac

SEQ ID NO: 1830 - DNA, 20 bp, Artificial sequence
  Synthetic oligonucleotide
tttgagtttctctttcggaa

SEQ ID NO: 1831 - DNA, 20 bp, Artificial sequence
  Synthetic oligonucleotide
gtttgagtttctctttcgga

SEQ ID NO: 1832 - DNA, 20 bp, Artificial sequence
  Synthetic oligonucleotide
tgtttgagtttctctttcgg

SEQ ID NO: 1833 - DNA, 20 bp, Artificial sequence
  Synthetic oligonucleotide
ttgtttgagtttctctttcg

SEQ ID NO: 1834 - DNA, 20 bp, Artificial sequence
  Synthetic oligonucleotide
attgtttgagtttctctttc

SEQ ID NO: 1835 - DNA, 20 bp, Artificial sequence
  Synthetic oligonucleotide
cattgtttgagtttctcttt

SEQ ID NO: 1836 - DNA, 20 bp, Artificial sequence
  Synthetic oligonucleotide
ccattgtttgagtttctctt

SEQ ID NO: 1837 - DNA, 20 bp, Artificial sequence
  Synthetic oligonucleotide
cccattgtttgagtttctct

SEQ ID NO: 1838 - DNA, 20 bp, Artificial sequence
  Synthetic oligonucleotide
ccccattgtttgagtttctc

SEQ ID NO: 1839 - DNA, 20 bp, Artificial sequence
  Synthetic oligonucleotide
tccccattgtttgagtttct

SEQ ID NO: 1840 - DNA, 20 bp, Artificial sequence
  Synthetic oligonucleotide
atccccattgtttgagtttc

SEQ ID NO: 1841 - DNA, 20 bp, Artificial sequence
  Synthetic oligonucleotide
catccccattgtttgagttt

SEQ ID NO: 1842 - DNA, 20 bp, Artificial sequence
  Synthetic oligonucleotide
tcatccccattgtttgagtt

SEQ ID NO: 1843 - DNA, 20 bp, Artificial sequence
  Synthetic oligonucleotide
atcatccccattgtttgagt

SEQ ID NO: 1844 - DNA, 20 bp, Artificial sequence
  Synthetic oligonucleotide
catcatccccattgtttgag

SEQ ID NO: 1845 - DNA, 20 bp, Artificial sequence
  Synthetic oligonucleotide
tcatcatccccattgtttga

SEQ ID NO: 1846 - DNA, 20 bp, Artificial sequence
  Synthetic oligonucleotide
ctcatcatccccattgtttg

SEQ ID NO: 1847 - DNA, 20 bp, Artificial sequence
  Synthetic oligonucleotide
actcatcatccccattgttt

SEQ ID NO: 1848 - DNA, 20 bp, Artificial sequence
  Synthetic oligonucleotide
gactcatcatccccattgtt

SEQ ID NO: 1849 - DNA, 20 bp, Artificial sequence
  Synthetic oligonucleotide
cgactcatcatccccattgt

SEQ ID NO: 1850 - DNA, 20 bp, Artificial sequence
  Synthetic oligonucleotide
acgactcatcatccccattg

SEQ ID NO: 1851 - DNA, 20 bp, Artificial sequence
  Synthetic oligonucleotide
aacgactcatcatccccatt

SEQ ID NO: 1852 - DNA, 20 bp, Artificial sequence
  Synthetic oligonucleotide
aaacgactcatcatccccat

SEQ ID NO: 1853 - DNA, 20 bp, Artificial sequence
  Synthetic oligonucleotide
aaaacgactcatcatcccca

SEQ ID NO: 1854 - DNA, 20 bp, Artificial sequence
  Synthetic oligonucleotide
taaaacgactcatcatcccc

SEQ ID NO: 1855 - DNA, 20 bp, Artificial sequence
  Synthetic oligonucleotide
ttaaaacgactcatcatccc

SEQ ID NO: 1856 - DNA, 20 bp, Artificial sequence
  Synthetic oligonucleotide
attaaaacgactcatcatcc

SEQ ID NO: 1857 - DNA, 20 bp, Artificial sequence
  Synthetic oligonucleotide
cattaaaacgactcatcatc

SEQ ID NO: 1858 - DNA, 20 bp, Artificial sequence
  Synthetic oligonucleotide
tcattaaaacgactcatcat

SEQ ID NO: 1859 - DNA, 20 bp, Artificial sequence
  Synthetic oligonucleotide
ttcattaaaacgactcatca

SEQ ID NO: 1860 - DNA, 20 bp, Artificial sequence
  Synthetic oligonucleotide
gttcattaaaacgactcatc

SEQ ID NO: 1861 - DNA, 20 bp, Artificial sequence
  Synthetic oligonucleotide
agttcattaaaacgactcat

SEQ ID NO: 1862 - DNA, 20 bp, Artificial sequence
  Synthetic oligonucleotide
aagttcattaaaacgactca

SEQ ID NO: 1863 - DNA, 20 bp, Artificial sequence
  Synthetic oligonucleotide
gaagttcattaaaacgactc

SEQ ID NO: 1864 - DNA, 20 bp, Artificial sequence
  Synthetic oligonucleotide
ggaagttcattaaaacgact

SEQ ID NO: 1865 - DNA, 20 bp, Artificial sequence
  Synthetic oligonucleotide
tggaagttcattaaaacgac

SEQ ID NO: 1866 - DNA, 20 bp, Artificial sequence
  Synthetic oligonucleotide
ttggaagttcattaaaacga

SEQ ID NO: 1867 - DNA, 20 bp, Artificial sequence
  Synthetic oligonucleotide
tttggaagttcattaaaacg

SEQ ID NO: 1868 - DNA, 20 bp, Artificial sequence
  Synthetic oligonucleotide
atttggaagttcattaaaac

SEQ ID NO: 1869 - DNA, 20 bp, Artificial sequence
  Synthetic oligonucleotide
gaatttggaagttcattaaa

SEQ ID NO: 1870 - DNA, 20 bp, Artificial sequence
  Synthetic oligonucleotide
tgaatttggaagttcattaa

SEQ ID NO: 1871 - DNA, 20 bp, Artificial sequence
  Synthetic oligonucleotide
ctgaatttggaagttcatta

SEQ ID NO: 1872 - DNA, 20 bp, Artificial sequence
  Synthetic oligonucleotide
tctgaatttggaagttcatt

SEQ ID NO: 1873 - DNA, 20 bp, Artificial sequence
  Synthetic oligonucleotide
atctgaatttggaagttcat

SEQ ID NO: 1874 - DNA, 20 bp, Artificial sequence
  Synthetic oligonucleotide
aatctgaatttggaagttca

SEQ ID NO: 1875 - DNA, 20 bp, Artificial sequence
  Synthetic oligonucleotide
gaatctgaatttggaagttc

SEQ ID NO: 1876 - DNA, 20 bp, Artificial sequence
  Synthetic oligonucleotide
ggaatctgaatttggaagtt

SEQ ID NO: 1877 - DNA, 20 bp, Artificial sequence
  Synthetic oligonucleotide
tggaatctgaatttggaagt

SEQ ID NO: 1878 - DNA, 20 bp, Artificial sequence
  Synthetic oligonucleotide
ctggaatctgaatttggaag

SEQ ID NO: 1879 - DNA, 20 bp, Artificial sequence
  Synthetic oligonucleotide
actggaatctgaatttggaa

SEQ ID NO: 1880 - DNA, 20 bp, Artificial sequence
  Synthetic oligonucleotide
tactggaatctgaatttgga

SEQ ID NO: 1881 - DNA, 20 bp, Artificial sequence
  Synthetic oligonucleotide
ctactggaatctgaatttgg

SEQ ID NO: 1882 - DNA, 20 bp, Artificial sequence
  Synthetic oligonucleotide
cctactggaatctgaatttg

SEQ ID NO: 1883 - DNA, 20 bp, Artificial sequence
  Synthetic oligonucleotide
cttgctgtctttcctactgg

SEQ ID NO: 1884 - DNA, 20 bp, Artificial sequence
  Synthetic oligonucleotide
acttgctgtctttcctactg

SEQ ID NO: 1885 - DNA, 20 bp, Artificial sequence
  Synthetic oligonucleotide
aacttgctgtctttcctact

SEQ ID NO: 1886 - DNA, 20 bp, Artificial sequence
  Synthetic oligonucleotide
caacttgctgtctttcctac

SEQ ID NO: 1887 - DNA, 20 bp, Artificial sequence
  Synthetic oligonucleotide
acaacttgctgtctttccta

SEQ ID NO: 1888 - DNA, 20 bp, Artificial sequence
  Synthetic oligonucleotide
cacaacttgctgtctttcct

SEQ ID NO: 1889 - DNA, 20 bp, Artificial sequence
  Synthetic oligonucleotide
ttaacacactgcacaacttg

SEQ ID NO: 1890 - DNA, 20 bp, Artificial sequence
  Synthetic oligonucleotide
gttaacacactgcacaactt

SEQ ID NO: 1891 - DNA, 20 bp, Artificial sequence
  Synthetic oligonucleotide
tgttaacacactgcacaact

SEQ ID NO: 1892 - DNA, 20 bp, Artificial sequence
  Synthetic oligonucleotide
acaaaaatcttgtgttaaca

SEQ ID NO: 1893 - DNA, 20 bp, Artificial sequence
  Synthetic oligonucleotide
tacaaaaatcttgtgttaac

SEQ ID NO: 1894 - DNA, 20 bp, Artificial sequence
  Synthetic oligonucleotide
catacaaaaatcttgtgtta

SEQ ID NO: 1895 - DNA, 20 bp, Artificial sequence
  Synthetic oligonucleotide
acatacaaaaatcttgtgtt

SEQ ID NO: 1896 - DNA, 20 bp, Artificial sequence
  Synthetic oligonucleotide
aacatacaaaaatcttgtgt

SEQ ID NO: 1897 - DNA, 20 bp, Artificial sequence
  Synthetic oligonucleotide
taacatacaaaaatcttgtg

SEQ ID NO: 1898 - DNA, 20 bp, Artificial sequence
  Synthetic oligonucleotide
tcatgcttgttgttaaataa

SEQ ID NO: 1899 - DNA, 20 bp, Artificial sequence
  Synthetic oligonucleotide
ttcatgcttgttgttaaata

SEQ ID NO: 1900 - DNA, 20 bp, Artificial sequence
  Synthetic oligonucleotide
tttcatgcttgttgttaaat

SEQ ID NO: 1901 - DNA, 20 bp, Artificial sequence
  Synthetic oligonucleotide
ttttcatgcttgttgttaaa

SEQ ID NO: 1902 - DNA, 20 bp, Artificial sequence
  Synthetic oligonucleotide
tttttcatgcttgttgttaa

SEQ ID NO: 1903 - DNA, 20 bp, Artificial sequence
  Synthetic oligonucleotide
tgacaccattctctgttttt

SEQ ID NO: 1904 - DNA, 20 bp, Artificial sequence
  Synthetic oligonucleotide
atgacaccattctctgtttt

SEQ ID NO: 1905 - DNA, 20 bp, Artificial sequence
  Synthetic oligonucleotide
gatgacaccattctctgttt

SEQ ID NO: 1906 - DNA, 20 bp, Artificial sequence
  Synthetic oligonucleotide
ggatgacaccattctctgtt

SEQ ID NO: 1907 - DNA, 20 bp, Artificial sequence
  Synthetic oligonucleotide
gggatgacaccattctctgt

SEQ ID NO: 1908 - DNA, 20 bp, Artificial sequence
  Synthetic oligonucleotide
tgggatgacaccattctctg

SEQ ID NO: 1909 - DNA, 20 bp, Artificial sequence
  Synthetic oligonucleotide
ttgggatgacaccattctct

SEQ ID NO: 1910 - DNA, 20 bp, Artificial sequence
  Synthetic oligonucleotide
gttgggatgacaccattctc

SEQ ID NO: 1911 - DNA, 20 bp, Artificial sequence
  Synthetic oligonucleotide
tgttgggatgacaccattct

SEQ ID NO: 1912 - DNA, 20 bp, Artificial sequence
  Synthetic oligonucleotide
atgttgggatgacaccattc

SEQ ID NO: 1913 - DNA, 20 bp, Artificial sequence
  Synthetic oligonucleotide
gatgttgggatgacaccatt

SEQ ID NO: 1914 - DNA, 20 bp, Artificial sequence
  Synthetic oligonucleotide
tgatgttgggatgacaccat

SEQ ID NO: 1915 - DNA, 20 bp, Artificial sequence
  Synthetic oligonucleotide
ctgatgttgggatgacacca

SEQ ID NO: 1916 - DNA, 20 bp, Artificial sequence
  Synthetic oligonucleotide
tctgatgttgggatgacacc

SEQ ID NO: 1917 - DNA, 20 bp, Artificial sequence
  Synthetic oligonucleotide
atctgatgttgggatgacac

SEQ ID NO: 1918 - DNA, 20 bp, Artificial sequence
  Synthetic oligonucleotide
aatctgatgttgggatgaca

SEQ ID NO: 1919 - DNA, 20 bp, Artificial sequence
  Synthetic oligonucleotide
gaatctgatgttgggatgac

SEQ ID NO: 1920 - DNA, 20 bp, Artificial sequence
  Synthetic oligonucleotide
agaatctgatgttgggatga

SEQ ID NO: 1921 - DNA, 20 bp, Artificial sequence
  Synthetic oligonucleotide
cagaatctgatgttgggatg

SEQ ID NO: 1922 - DNA, 20 bp, Artificial sequence
  Synthetic oligonucleotide
gcagaatctgatgttgggat

SEQ ID NO: 1923 - DNA, 20 bp, Artificial sequence
  Synthetic oligonucleotide
ggcagaatctgatgttggga

SEQ ID NO: 1924 - DNA, 20 bp, Artificial sequence
  Synthetic oligonucleotide
tggcagaatctgatgttggg

SEQ ID NO: 1925 - DNA, 20 bp, Artificial sequence
  Synthetic oligonucleotide
gtggcagaatctgatgttgg

SEQ ID NO: 1926 - DNA, 20 bp, Artificial sequence
  Synthetic oligonucleotide
tgtggcagaatctgatgttg

SEQ ID NO: 1927 - DNA, 20 bp, Artificial sequence
  Synthetic oligonucleotide
gtgtggcagaatctgatgtt

SEQ ID NO: 1928 - DNA, 20 bp, Artificial sequence
  Synthetic oligonucleotide
tgtgtggcagaatctgatgt

SEQ ID NO: 1929 - DNA, 20 bp, Artificial sequence
  Synthetic oligonucleotide
gttagaatgtgttttactat

SEQ ID NO: 1930 - DNA, 20 bp, Artificial sequence
  Synthetic oligonucleotide
tgttagaatgtgttttacta

SEQ ID NO: 1931 - DNA, 20 bp, Artificial sequence
  Synthetic oligonucleotide
ctgttagaatgtgttttact

SEQ ID NO: 1932 - DNA, 20 bp, Artificial sequence
  Synthetic oligonucleotide
gctgttagaatgtgttttac

SEQ ID NO: 1933 - DNA, 20 bp, Artificial sequence
  Synthetic oligonucleotide
tgctgttagaatgtgtttta

SEQ ID NO: 1934 - DNA, 20 bp, Artificial sequence
  Synthetic oligonucleotide
ttgctgttagaatgtgtttt

SEQ ID NO: 1935 - DNA, 20 bp, Artificial sequence
  Synthetic oligonucleotide
attgctgttagaatgtgttt

SEQ ID NO: 1936 - DNA, 20 bp, Artificial sequence
  Synthetic oligonucleotide
tattgctgttagaatgtgtt

SEQ ID NO: 1937 - DNA, 20 bp, Artificial sequence
  Synthetic oligonucleotide
gtattgctgttagaatgtgt

SEQ ID NO: 1938 - DNA, 20 bp, Artificial sequence
  Synthetic oligonucleotide
tgtattgctgttagaatgtg

SEQ ID NO: 1939 - DNA, 20 bp, Artificial sequence
  Synthetic oligonucleotide
ttgtattgctgttagaatgt

SEQ ID NO: 1940 - DNA, 20 bp, Artificial sequence
  Synthetic oligonucleotide
gttgtattgctgttagaatg

SEQ ID NO: 1941 - DNA, 20 bp, Artificial sequence
  Synthetic oligonucleotide
tgttgtattgctgttagaat

SEQ ID NO: 1942 - DNA, 20 bp, Artificial sequence
  Synthetic oligonucleotide
ctgttgtattgctgttagaa

SEQ ID NO: 1943 - DNA, 20 bp, Artificial sequence
  Synthetic oligonucleotide
tctgttgtattgctgttaga

SEQ ID NO: 1944 - DNA, 20 bp, Artificial sequence
  Synthetic oligonucleotide
ctctgttgtattgctgttag

SEQ ID NO: 1945 - DNA, 20 bp, Artificial sequence
  Synthetic oligonucleotide
tctctgttgtattgctgtta

SEQ ID NO: 1946 - DNA, 20 bp, Artificial sequence
  Synthetic oligonucleotide
ttctctgttgtattgctgtt

SEQ ID NO: 1947 - DNA, 20 bp, Artificial sequence
  Synthetic oligonucleotide
gttctctgttgtattgctgt

SEQ ID NO: 1948 - DNA, 20 bp, Artificial sequence
  Synthetic oligonucleotide
agttctctgttgtattgctg

SEQ ID NO: 1949 - DNA, 20 bp, Artificial sequence
  Synthetic oligonucleotide
cagttctctgttgtattgct

SEQ ID NO: 1950 - DNA, 20 bp, Artificial sequence
  Synthetic oligonucleotide
ctgatatcacacagttctct

SEQ ID NO: 1951 - DNA, 20 bp, Artificial sequence
  Synthetic oligonucleotide
tctgatatcacacagttctc

SEQ ID NO: 1952 - DNA, 20 bp, Artificial sequence
  Synthetic oligonucleotide
ttctgatatcacacagttct

SEQ ID NO: 1953 - DNA, 20 bp, Artificial sequence
  Synthetic oligonucleotide
tttctgatatcacacagttc

SEQ ID NO: 1954 - DNA, 20 bp, Artificial sequence
  Synthetic oligonucleotide
gtttctgatatcacacagtt

SEQ ID NO: 1955 - DNA, 20 bp, Artificial sequence
  Synthetic oligonucleotide
agtttctgatatcacacagt

SEQ ID NO: 1956 - DNA, 20 bp, Artificial sequence
  Synthetic oligonucleotide
gagtttctgatatcacacag

SEQ ID NO: 1957 - DNA, 20 bp, Artificial sequence
  Synthetic oligonucleotide
ggagtttctgatatcacaca

SEQ ID NO: 1958 - DNA, 20 bp, Artificial sequence
  Synthetic oligonucleotide
aggagtttctgatatcacac

SEQ ID NO: 1959 - DNA, 20 bp, Artificial sequence
  Synthetic oligonucleotide
aaggagtttctgatatcaca

SEQ ID NO: 1960 - DNA, 20 bp, Artificial sequence
  Synthetic oligonucleotide
aaaggagtttctgatatcac

SEQ ID NO: 1961 - DNA, 20 bp, Artificial sequence
  Synthetic oligonucleotide
caaaggagtttctgatatca

SEQ ID NO: 1962 - DNA, 20 bp, Artificial sequence
  Synthetic oligonucleotide
ccaaaggagtttctgatatc

SEQ ID NO: 1963 - DNA, 20 bp, Artificial sequence
  Synthetic oligonucleotide
accaaaggagtttctgatat

SEQ ID NO: 1964 - DNA, 20 bp, Artificial sequence
  Synthetic oligonucleotide
taccaaaggagtttctgata

SEQ ID NO: 1965 - DNA, 20 bp, Artificial sequence
  Synthetic oligonucleotide
ataccaaaggagtttctgat

SEQ ID NO: 1966 - DNA, 20 bp, Artificial sequence
  Synthetic oligonucleotide
aataccaaaggagtttctga

SEQ ID NO: 1967 - DNA, 20 bp, Artificial sequence
  Synthetic oligonucleotide
caataccaaaggagtttctg

SEQ ID NO: 1968 - DNA, 20 bp, Artificial sequence
  Synthetic oligonucleotide
gcaataccaaaggagtttct

SEQ ID NO: 1969 - DNA, 20 bp, Artificial sequence
  Synthetic oligonucleotide
gaattattatagggcaatac

SEQ ID NO: 1970 - DNA, 20 bp, Artificial sequence
  Synthetic oligonucleotide
agaattattatagggcaata

SEQ ID NO: 1971 - DNA, 20 bp, Artificial sequence
  Synthetic oligonucleotide
tagaattattatagggcaat

SEQ ID NO: 1972 - DNA, 20 bp, Artificial sequence
  Synthetic oligonucleotide
ttagaattattatagggcaa

SEQ ID NO: 1973 - DNA, 20 bp, Artificial sequence
  Synthetic oligonucleotide
tttagaattattatagggca

SEQ ID NO: 1974 - DNA, 20 bp, Artificial sequence
  Synthetic oligonucleotide
ctttagaattattatagggc

SEQ ID NO: 1975 - DNA, 20 bp, Artificial sequence
  Synthetic oligonucleotide
actttagaattattataggg

SEQ ID NO: 1976 - DNA, 20 bp, Artificial sequence
  Synthetic oligonucleotide
cggtaactttagaattatta

SEQ ID NO: 1977 - DNA, 20 bp, Artificial sequence
  Synthetic oligonucleotide
ccggtaactttagaattatt

SEQ ID NO: 1978 - DNA, 20 bp, Artificial sequence
  Synthetic oligonucleotide
accggtaactttagaattat

SEQ ID NO: 1979 - DNA, 20 bp, Artificial sequence
  Synthetic oligonucleotide
taccggtaactttagaatta

SEQ ID NO: 1980 - DNA, 20 bp, Artificial sequence
  Synthetic oligonucleotide
ttaccggtaactttagaatt

SEQ ID NO: 1981 - DNA, 20 bp, Artificial sequence
  Synthetic oligonucleotide
tttaccggtaactttagaat

SEQ ID NO: 1982 - DNA, 20 bp, Artificial sequence
  Synthetic oligonucleotide
ctttaccggtaactttagaa

SEQ ID NO: 1983 - DNA, 20 bp, Artificial sequence
  Synthetic oligonucleotide
tctttaccggtaactttaga

SEQ ID NO: 1984 - DNA, 20 bp, Artificial sequence
  Synthetic oligonucleotide
atctttaccggtaactttag

SEQ ID NO: 1985 - DNA, 20 bp, Artificial sequence
  Synthetic oligonucleotide
aatctttaccggtaacttta

SEQ ID NO: 1986 - DNA, 20 bp, Artificial sequence
  Synthetic oligonucleotide
gaatctttaccggtaacttt

SEQ ID NO: 1987 - DNA, 20 bp, Artificial sequence
  Synthetic oligonucleotide
tgaatctttaccggtaactt

SEQ ID NO: 1988 - DNA, 20 bp, Artificial sequence
  Synthetic oligonucleotide
ctgaatctttaccggtaact

SEQ ID NO: 1989 - DNA, 20 bp, Artificial sequence
  Synthetic oligonucleotide
tctgaatctttaccggtaac

SEQ ID NO: 1990 - DNA, 20 bp, Artificial sequence
  Synthetic oligonucleotide
atctgaatctttaccggtaa

SEQ ID NO: 1991 - DNA, 20 bp, Artificial sequence
  Synthetic oligonucleotide
catctgaatctttaccggta

SEQ ID NO: 1992 - DNA, 20 bp, Artificial sequence
  Synthetic oligonucleotide
acatctgaatctttaccggt

SEQ ID NO: 1993 - DNA, 20 bp, Artificial sequence
  Synthetic oligonucleotide
aacatctgaatctttaccgg

SEQ ID NO: 1994 - DNA, 20 bp, Artificial sequence
  Synthetic oligonucleotide
gaacatctgaatctttaccg

SEQ ID NO: 1995 - DNA, 20 bp, Artificial sequence
  Synthetic oligonucleotide
agaacatctgaatctttacc

SEQ ID NO: 1996 - DNA, 20 bp, Artificial sequence
  Synthetic oligonucleotide
aagaacatctgaatctttac

SEQ ID NO: 1997 - DNA, 20 bp, Artificial sequence
  Synthetic oligonucleotide
taagaacatctgaatcttta

SEQ ID NO: 1998 - DNA, 20 bp, Artificial sequence
  Synthetic oligonucleotide
ataagaacatctgaatcttt

SEQ ID NO: 1999 - DNA, 20 bp, Artificial sequence
  Synthetic oligonucleotide
gataagaacatctgaatctt

SEQ ID NO: 2000 - DNA, 20 bp, Artificial sequence
  Synthetic oligonucleotide
tgataagaacatctgaatct

SEQ ID NO: 2001 - DNA, 20 bp, Artificial sequence
  Synthetic oligonucleotide
ctgataagaacatctgaatc

SEQ ID NO: 2002 - DNA, 20 bp, Artificial sequence
  Synthetic oligonucleotide
tctgataagaacatctgaat

SEQ ID NO: 2003 - DNA, 20 bp, Artificial sequence
  Synthetic oligonucleotide
ctctgataagaacatctgaa

SEQ ID NO: 2004 - DNA, 20 bp, Artificial sequence
  Synthetic oligonucleotide
gctctgataagaacatctga

SEQ ID NO: 2005 - DNA, 20 bp, Artificial sequence
  Synthetic oligonucleotide
ggctctgataagaacatctg

SEQ ID NO: 2006 - DNA, 20 bp, Artificial sequence
  Synthetic oligonucleotide
aggctctgataagaacatct

SEQ ID NO: 2007 - DNA, 20 bp, Artificial sequence
  Synthetic oligonucleotide
gaggctctgataagaacatc

SEQ ID NO: 2008 - DNA, 20 bp, Artificial sequence
  Synthetic oligonucleotide
tgaggctctgataagaacat

SEQ ID NO: 2009 - DNA, 20 bp, Artificial sequence
  Synthetic oligonucleotide
ctgaggctctgataagaaca

SEQ ID NO: 2010 - DNA, 20 bp, Artificial sequence
  Synthetic oligonucleotide
tctgaggctctgataagaac

SEQ ID NO: 2011 - DNA, 20 bp, Artificial sequence
  Synthetic oligonucleotide
ttctgaggctctgataagaa

SEQ ID NO: 2012 - DNA, 20 bp, Artificial sequence
  Synthetic oligonucleotide
gttctgaggctctgataaga

SEQ ID NO: 2013 - DNA, 20 bp, Artificial sequence
  Synthetic oligonucleotide
tgttctgaggctctgataag

SEQ ID NO: 2014 - DNA, 20 bp, Artificial sequence
  Synthetic oligonucleotide
ttgttctgaggctctgataa

SEQ ID NO: 2015 - DNA, 20 bp, Artificial sequence
  Synthetic oligonucleotide
gttgttctgaggctctgata

SEQ ID NO: 2016 - DNA, 20 bp, Artificial sequence
  Synthetic oligonucleotide
tgttgttctgaggctctgat

SEQ ID NO: 2017 - DNA, 20 bp, Artificial sequence
  Synthetic oligonucleotide
ctgttgttctgaggctctga

SEQ ID NO: 2018 - DNA, 20 bp, Artificial sequence
  Synthetic oligonucleotide
tctgttgttctgaggctctg

SEQ ID NO: 2019 - DNA, 20 bp, Artificial sequence
  Synthetic oligonucleotide
atctgttgttctgaggctct

SEQ ID NO: 2020 - DNA, 20 bp, Artificial sequence
  Synthetic oligonucleotide
tatctgttgttctgaggctc

SEQ ID NO: 2021 - DNA, 20 bp, Artificial sequence
  Synthetic oligonucleotide
ctatctgttgttctgaggct

SEQ ID NO: 2022 - DNA, 20 bp, Artificial sequence
  Synthetic oligonucleotide
cctatctgttgttctgaggc

SEQ ID NO: 2023 - DNA, 20 bp, Artificial sequence
  Synthetic oligonucleotide
tcctatctgttgttctgagg

SEQ ID NO: 2024 - DNA, 20 bp, Artificial sequence
  Synthetic oligonucleotide
ttcctatctgttgttctgag

SEQ ID NO: 2025 - DNA, 20 bp, Artificial sequence
  Synthetic oligonucleotide
cttcctatctgttgttctga

SEQ ID NO: 2026 - DNA, 20 bp, Artificial sequence
  Synthetic oligonucleotide
acttcctatctgttgttctg

SEQ ID NO: 2027 - DNA, 20 bp, Artificial sequence
  Synthetic oligonucleotide
gacttcctatctgttgttct

SEQ ID NO: 2028 - DNA, 20 bp, Artificial sequence
  Synthetic oligonucleotide
agacttcctatctgttgttc

SEQ ID NO: 2029 - DNA, 20 bp, Artificial sequence
  Synthetic oligonucleotide
aagacttcctatctgttgtt

SEQ ID NO: 2030 - DNA, 20 bp, Artificial sequence
  Synthetic oligonucleotide
caagacttcctatctgttgt

SEQ ID NO: 2031 - DNA, 20 bp, Artificial sequence
  Synthetic oligonucleotide
tcaagacttcctatctgttg

SEQ ID NO: 2032 - DNA, 20 bp, Artificial sequence
  Synthetic oligonucleotide
gtcaagacttcctatctgtt

SEQ ID NO: 2033 - DNA, 20 bp, Artificial sequence
  Synthetic oligonucleotide
agtcaagacttcctatctgt

SEQ ID NO: 2034 - DNA, 20 bp, Artificial sequence
  Synthetic oligonucleotide
tccactgggagagtcaagac

SEQ ID NO: 2035 - DNA, 20 bp, Artificial sequence
  Synthetic oligonucleotide
ttcattaacattccactggg

SEQ ID NO: 2036 - DNA, 20 bp, Artificial sequence
  Synthetic oligonucleotide
attcattaacattccactgg

SEQ ID NO: 2037 - DNA, 20 bp, Artificial sequence
  Synthetic oligonucleotide
gattcattaacattccactg

SEQ ID NO: 2038 - DNA, 20 bp, Artificial sequence
  Synthetic oligonucleotide
ggattcattaacattccact

SEQ ID NO: 2039 - DNA, 20 bp, Artificial sequence
  Synthetic oligonucleotide
cggattcattaacattccac

SEQ ID NO: 2040 - DNA, 20 bp, Artificial sequence
  Synthetic oligonucleotide
ccggattcattaacattcca

SEQ ID NO: 2041 - DNA, 20 bp, Artificial sequence
  Synthetic oligonucleotide
accggattcattaacattcc

SEQ ID NO: 2042 - DNA, 20 bp, Artificial sequence
  Synthetic oligonucleotide
taccggattcattaacattc

SEQ ID NO: 2043 - DNA, 20 bp, Artificial sequence
  Synthetic oligonucleotide
ctaccggattcattaacatt

SEQ ID NO: 2044 - DNA, 20 bp, Artificial sequence
  Synthetic oligonucleotide
tctaccggattcattaacat

SEQ ID NO: 2045 - DNA, 20 bp, Artificial sequence
  Synthetic oligonucleotide
ttctaccggattcattaaca

SEQ ID NO: 2046 - DNA, 20 bp, Artificial sequence
  Synthetic oligonucleotide
cttctaccggattcattaac

SEQ ID NO: 2047 - DNA, 20 bp, Artificial sequence
  Synthetic oligonucleotide
tcttctaccggattcattaa

SEQ ID NO: 2048 - DNA, 20 bp, Artificial sequence
  Synthetic oligonucleotide
atcttctaccggattcatta

SEQ ID NO: 2049 - DNA, 20 bp, Artificial sequence
  Synthetic oligonucleotide
catcttctaccggattcatt

SEQ ID NO: 2050 - DNA, 20 bp, Artificial sequence
  Synthetic oligonucleotide
gcatcttctaccggattcat

SEQ ID NO: 2051 - DNA, 20 bp, Artificial sequence
  Synthetic oligonucleotide
ggcatcttctaccggattca

SEQ ID NO: 2052 - DNA, 20 bp, Artificial sequence
  Synthetic oligonucleotide
tggcatcttctaccggattc

SEQ ID NO: 2053 - DNA, 20 bp, Artificial sequence
  Synthetic oligonucleotide
gtggcatcttctaccggatt

SEQ ID NO: 2054 - DNA, 20 bp, Artificial sequence
  Synthetic oligonucleotide
tgtggcatcttctaccggat

SEQ ID NO: 2055 - DNA, 20 bp, Artificial sequence
  Synthetic oligonucleotide
ctgtggcatcttctaccgga

SEQ ID NO: 2056 - DNA, 20 bp, Artificial sequence
  Synthetic oligonucleotide
acctgtggcatcttctaccg

SEQ ID NO: 2057 - DNA, 20 bp, Artificial sequence
  Synthetic oligonucleotide
cacctgtggcatcttctacc

SEQ ID NO: 2058 - DNA, 20 bp, Artificial sequence
  Synthetic oligonucleotide
tcacctgtggcatcttctac

SEQ ID NO: 2059 - DNA, 20 bp, Artificial sequence
  Synthetic oligonucleotide
gtcacctgtggcatcttcta

SEQ ID NO: 2060 - DNA, 20 bp, Artificial sequence
  Synthetic oligonucleotide
ggtcacctgtggcatcttct

SEQ ID NO: 2061 - DNA, 20 bp, Artificial sequence
  Synthetic oligonucleotide
tggtcacctgtggcatcttc

SEQ ID NO: 2062 - DNA, 20 bp, Artificial sequence
  Synthetic oligonucleotide
ttggtcacctgtggcatctt

SEQ ID NO: 2063 - DNA, 20 bp, Artificial sequence
  Synthetic oligonucleotide
tttggtcacctgtggcatct

SEQ ID NO: 2064 - DNA, 20 bp, Artificial sequence
  Synthetic oligonucleotide
ttttggtcacctgtggcatc

SEQ ID NO: 2065 - DNA, 20 bp, Artificial sequence
  Synthetic oligonucleotide
attttggtcacctgtggcat

SEQ ID NO: 2066 - DNA, 20 bp, Artificial sequence
  Synthetic oligonucleotide
cattttggtcacctgtggca

SEQ ID NO: 2067 - DNA, 20 bp, Artificial sequence
  Synthetic oligonucleotide
ccattttggtcacctgtggc

SEQ ID NO: 2068 - DNA, 20 bp, Artificial sequence
  Synthetic oligonucleotide
ctgaaaacaaattccatttt

SEQ ID NO: 2069 - DNA, 20 bp, Artificial sequence
  Synthetic oligonucleotide
tctgaaaacaaattccattt

SEQ ID NO: 2070 - DNA, 20 bp, Artificial sequence
  Synthetic oligonucleotide
ctctgaaaacaaattccatt

SEQ ID NO: 2071 - DNA, 20 bp, Artificial sequence
  Synthetic oligonucleotide
actctgaaaacaaattccat

SEQ ID NO: 2072 - DNA, 20 bp, Artificial sequence
  Synthetic oligonucleotide
cactctgaaaacaaattcca

SEQ ID NO: 2073 - DNA, 20 bp, Artificial sequence
  Synthetic oligonucleotide
tcactctgaaaacaaattcc

SEQ ID NO: 2074 - DNA, 20 bp, Artificial sequence
  Synthetic oligonucleotide
ctcactctgaaaacaaattc

SEQ ID NO: 2075 - DNA, 20 bp, Artificial sequence
  Synthetic oligonucleotide
cctcactctgaaaacaaatt

SEQ ID NO: 2076 - DNA, 20 bp, Artificial sequence
  Synthetic oligonucleotide
tcctcactctgaaaacaaat

SEQ ID NO: 2077 - DNA, 20 bp, Artificial sequence
  Synthetic oligonucleotide
ttcctcactctgaaaacaaa

SEQ ID NO: 2078 - DNA, 20 bp, Artificial sequence
  Synthetic oligonucleotide
attcctcactctgaaaacaa

SEQ ID NO: 2079 - DNA, 20 bp, Artificial sequence
  Synthetic oligonucleotide
gattcctcactctgaaaaca

SEQ ID NO: 2080 - DNA, 20 bp, Artificial sequence
  Synthetic oligonucleotide
agattcctcactctgaaaac

SEQ ID NO: 2081 - DNA, 20 bp, Artificial sequence
  Synthetic oligonucleotide
tagattcctcactctgaaaa

SEQ ID NO: 2082 - DNA, 20 bp, Artificial sequence
  Synthetic oligonucleotide
ttagattcctcactctgaaa

SEQ ID NO: 2083 - DNA, 20 bp, Artificial sequence
  Synthetic oligonucleotide
tttagattcctcactctgaa

SEQ ID NO: 2084 - DNA, 20 bp, Artificial sequence
  Synthetic oligonucleotide
ctttagattcctcactctga

SEQ ID NO: 2085 - DNA, 20 bp, Artificial sequence
  Synthetic oligonucleotide
gctttagattcctcactctg

SEQ ID NO: 2086 - DNA, 20 bp, Artificial sequence
  Synthetic oligonucleotide
tgctttagattcctcactct

SEQ ID NO: 2087 - DNA, 20 bp, Artificial sequence
  Synthetic oligonucleotide
ttgctttagattcctcactc

SEQ ID NO: 2088 - DNA, 20 bp, Artificial sequence
  Synthetic oligonucleotide
cttgctttagattcctcact

SEQ ID NO: 2089 - DNA, 20 bp, Artificial sequence
  Synthetic oligonucleotide
tcttgctttagattcctcac

SEQ ID NO: 2090 - DNA, 20 bp, Artificial sequence
  Synthetic oligonucleotide
ctcttgctttagattcctca

SEQ ID NO: 2091 - DNA, 20 bp, Artificial sequence
  Synthetic oligonucleotide
gctcttgctttagattcctc

SEQ ID NO: 2092 - DNA, 20 bp, Artificial sequence
  Synthetic oligonucleotide
cagtttcagaacaagctctt

SEQ ID NO: 2093 - DNA, 20 bp, Artificial sequence
  Synthetic oligonucleotide
tcagtttcagaacaagctct

SEQ ID NO: 2094 - DNA, 20 bp, Artificial sequence
  Synthetic oligonucleotide
ttcagtttcagaacaagctc

SEQ ID NO: 2095 - DNA, 20 bp, Artificial sequence
  Synthetic oligonucleotide
cttcagtttcagaacaagct

SEQ ID NO: 2096 - DNA, 20 bp, Artificial sequence
  Synthetic oligonucleotide
tcttcagtttcagaacaagc

SEQ ID NO: 2097 - DNA, 20 bp, Artificial sequence
  Synthetic oligonucleotide
ctcttcagtttcagaacaag

SEQ ID NO: 2098 - DNA, 20 bp, Artificial sequence
  Synthetic oligonucleotide
actcttcagtttcagaacaa

SEQ ID NO: 2099 - DNA, 20 bp, Artificial sequence
  Synthetic oligonucleotide
gactcttcagtttcagaaca

SEQ ID NO: 2100 - DNA, 20 bp, Artificial sequence
  Synthetic oligonucleotide
tgactcttcagtttcagaac

SEQ ID NO: 2101 - DNA, 20 bp, Artificial sequence
  Synthetic oligonucleotide
ttgactcttcagtttcagaa

SEQ ID NO: 2102 - DNA, 20 bp, Artificial sequence
  Synthetic oligonucleotide
tttgactcttcagtttcaga

SEQ ID NO: 2103 - DNA, 20 bp, Artificial sequence
  Synthetic oligonucleotide
gtttgactcttcagtttcag

SEQ ID NO: 2104 - DNA, 20 bp, Artificial sequence
  Synthetic oligonucleotide
tgtttgactcttcagtttca

SEQ ID NO: 2105 - DNA, 20 bp, Artificial sequence
  Synthetic oligonucleotide
gtgtttgactcttcagtttc

SEQ ID NO: 2106 - DNA, 20 bp, Artificial sequence
  Synthetic oligonucleotide
cgtgtttgactcttcagttt

SEQ ID NO: 2107 - DNA, 20 bp, Artificial sequence
  Synthetic oligonucleotide
acgtgtttgactcttcagtt

SEQ ID NO: 2108 - DNA, 20 bp, Artificial sequence
  Synthetic oligonucleotide
cacgtgtttgactcttcagt

SEQ ID NO: 2109 - DNA, 20 bp, Artificial sequence
  Synthetic oligonucleotide
acacgtgtttgactcttcag

SEQ ID NO: 2110 - DNA, 20 bp, Artificial sequence
  Synthetic oligonucleotide
aacacgtgtttgactcttca

SEQ ID NO: 2111 - DNA, 20 bp, Artificial sequence
  Synthetic oligonucleotide
gccaatctgaacaacacgtg

SEQ ID NO: 2112 - DNA, 20 bp, Artificial sequence
  Synthetic oligonucleotide
tgccaatctgaacaacacgt

SEQ ID NO: 2113 - DNA, 20 bp, Artificial sequence
  Synthetic oligonucleotide
ctgccaatctgaacaacacg

SEQ ID NO: 2114 - DNA, 20 bp, Artificial sequence
  Synthetic oligonucleotide
gctgccaatctgaacaacac

SEQ ID NO: 2115 - DNA, 20 bp, Artificial sequence
  Synthetic oligonucleotide
cgctgccaatctgaacaaca

SEQ ID NO: 2116 - DNA, 20 bp, Artificial sequence
  Synthetic oligonucleotide
ccgctgccaatctgaacaac

SEQ ID NO: 2117 - DNA, 20 bp, Artificial sequence
  Synthetic oligonucleotide
gccgctgccaatctgaacaa

SEQ ID NO: 2118 - DNA, 20 bp, Artificial sequence
  Synthetic oligonucleotide
tgccgctgccaatctgaaca

SEQ ID NO: 2119 - DNA, 20 bp, Artificial sequence
  Synthetic oligonucleotide
atgccgctgccaatctgaac

SEQ ID NO: 2120 - DNA, 20 bp, Artificial sequence
  Synthetic oligonucleotide
aatgccgctgccaatctgaa

SEQ ID NO: 2121 - DNA, 20 bp, Artificial sequence
  Synthetic oligonucleotide
aaatgccgctgccaatctga

SEQ ID NO: 2122 - DNA, 20 bp, Artificial sequence
  Synthetic oligonucleotide
gaaatgccgctgccaatctg

SEQ ID NO: 2123 - DNA, 20 bp, Artificial sequence
  Synthetic oligonucleotide
cgaaatgccgctgccaatct

SEQ ID NO: 2124 - DNA, 20 bp, Artificial sequence
  Synthetic oligonucleotide
tcgaaatgccgctgccaatc

SEQ ID NO: 2125 - DNA, 20 bp, Artificial sequence
  Synthetic oligonucleotide
atcgaaatgccgctgccaat

SEQ ID NO: 2126 - DNA, 20 bp, Artificial sequence
  Synthetic oligonucleotide
catcgaaatgccgctgccaa

SEQ ID NO: 2127 - DNA, 20 bp, Artificial sequence
  Synthetic oligonucleotide
acatcgaaatgccgctgcca

SEQ ID NO: 2128 - DNA, 20 bp, Artificial sequence
  Synthetic oligonucleotide
tacatcgaaatgccgctgcc

SEQ ID NO: 2129 - DNA, 20 bp, Artificial sequence
  Synthetic oligonucleotide
ctacatcgaaatgccgctgc

SEQ ID NO: 2130 - DNA, 20 bp, Artificial sequence
  Synthetic oligonucleotide
gctacatcgaaatgccgctg

SEQ ID NO: 2131 - DNA, 20 bp, Artificial sequence
  Synthetic oligonucleotide
ggctacatcgaaatgccgct

SEQ ID NO: 2132 - DNA, 20 bp, Artificial sequence
  Synthetic oligonucleotide
ccagggctacatcgaaatgc

SEQ ID NO: 2133 - DNA, 20 bp, Artificial sequence
  Synthetic oligonucleotide
tcccagggctacatcgaaat

SEQ ID NO: 2134 - DNA, 20 bp, Artificial sequence
  Synthetic oligonucleotide
ttcccagggctacatcgaaa

SEQ ID NO: 2135 - DNA, 20 bp, Artificial sequence
  Synthetic oligonucleotide
cttcccagggctacatcgaa

SEQ ID NO: 2136 - DNA, 20 bp, Artificial sequence
  Synthetic oligonucleotide
tcttcccagggctacatcga

SEQ ID NO: 2137 - DNA, 20 bp, Artificial sequence
  Synthetic oligonucleotide
ttcttcccagggctacatcg

SEQ ID NO: 2138 - DNA, 20 bp, Artificial sequence
  Synthetic oligonucleotide
attcttcccagggctacatc

SEQ ID NO: 2139 - DNA, 20 bp, Artificial sequence
  Synthetic oligonucleotide
cattcttcccagggctacat

SEQ ID NO: 2140 - DNA, 20 bp, Artificial sequence
  Synthetic oligonucleotide
ccattcttcccagggctaca

SEQ ID NO: 2141 - DNA, 20 bp, Artificial sequence
  Synthetic oligonucleotide
accattcttcccagggctac

SEQ ID NO: 2142 - DNA, 20 bp, Artificial sequence
  Synthetic oligonucleotide
aaccattcttcccagggcta

SEQ ID NO: 2143 - DNA, 20 bp, Artificial sequence
  Synthetic oligonucleotide
aaaccattcttcccagggct

SEQ ID NO: 2144 - DNA, 20 bp, Artificial sequence
  Synthetic oligonucleotide
taaaccattcttcccagggc

SEQ ID NO: 2145 - DNA, 20 bp, Artificial sequence
  Synthetic oligonucleotide
ataaaccattcttcccaggg

SEQ ID NO: 2146 - DNA, 20 bp, Artificial sequence
  Synthetic oligonucleotide
cataaaccattcttcccagg

SEQ ID NO: 2147 - DNA, 20 bp, Artificial sequence
  Synthetic oligonucleotide
acataaaccattcttcccag

SEQ ID NO: 2148 - DNA, 20 bp, Artificial sequence
  Synthetic oligonucleotide
gacataaaccattcttccca

SEQ ID NO: 2149 - DNA, 20 bp, Artificial sequence
  Synthetic oligonucleotide
tgacataaaccattcttccc

SEQ ID NO: 2150 - DNA, 20 bp, Artificial sequence
  Synthetic oligonucleotide
ttgacataaaccattcttcc

SEQ ID NO: 2151 - DNA, 20 bp, Artificial sequence
  Synthetic oligonucleotide
gttgacataaaccattcttc

SEQ ID NO: 2152 - DNA, 20 bp, Artificial sequence
  Synthetic oligonucleotide
tgttgacataaaccattctt

SEQ ID NO: 2153 - DNA, 20 bp, Artificial sequence
  Synthetic oligonucleotide
ttgttgacataaaccattct

SEQ ID NO: 2154 - DNA, 20 bp, Artificial sequence
  Synthetic oligonucleotide
tttgttgacataaaccattc

SEQ ID NO: 2155 - DNA, 20 bp, Artificial sequence
  Synthetic oligonucleotide
ttttgttgacataaaccatt

SEQ ID NO: 2156 - DNA, 20 bp, Artificial sequence
  Synthetic oligonucleotide
attttgttgacataaaccat

SEQ ID NO: 2157 - DNA, 20 bp, Artificial sequence
  Synthetic oligonucleotide
cattttgttgacataaacca

SEQ ID NO: 2158 - DNA, 20 bp, Artificial sequence
  Synthetic oligonucleotide
tcattttgttgacataaacc

SEQ ID NO: 2159 - DNA, 20 bp, Artificial sequence
  Synthetic oligonucleotide
gagtccagtcattttgttga

SEQ ID NO: 2160 - DNA, 20 bp, Artificial sequence
  Synthetic oligonucleotide
tgagtccagtcattttgttg

SEQ ID NO: 2161 - DNA, 20 bp, Artificial sequence
  Synthetic oligonucleotide
ctgagtccagtcattttgtt

SEQ ID NO: 2162 - DNA, 20 bp, Artificial sequence
  Synthetic oligonucleotide
caatgaatgtgctgagtcca

SEQ ID NO: 2163 - DNA, 20 bp, Artificial sequence
  Synthetic oligonucleotide
aagcagcctgaatgtcctca

SEQ ID NO: 2164 - DNA, 20 bp, Artificial sequence
  Synthetic oligonucleotide
caagcagcctgaatgtcctc

SEQ ID NO: 2165 - DNA, 20 bp, Artificial sequence
  Synthetic oligonucleotide
acaagcagcctgaatgtcct

SEQ ID NO: 2166 - DNA, 20 bp, Artificial sequence
  Synthetic oligonucleotide
tacaagcagcctgaatgtcc

SEQ ID NO: 2167 - DNA, 20 bp, Artificial sequence
  Synthetic oligonucleotide
gtacaagcagcctgaatgtc

SEQ ID NO: 2168 - DNA, 20 bp, Artificial sequence
  Synthetic oligonucleotide
agtacaagcagcctgaatgt

SEQ ID NO: 2169 - DNA, 20 bp, Artificial sequence
  Synthetic oligonucleotide
tagtacaagcagcctgaatg

SEQ ID NO: 2170 - DNA, 20 bp, Artificial sequence
  Synthetic oligonucleotide
ttagtacaagcagcctgaat

SEQ ID NO: 2171 - DNA, 20 bp, Artificial sequence
  Synthetic oligonucleotide
tttagtacaagcagcctgaa

SEQ ID NO: 2172 - DNA, 20 bp, Artificial sequence
  Synthetic oligonucleotide
ctttagtacaagcagcctga

SEQ ID NO: 2173 - DNA, 20 bp, Artificial sequence
  Synthetic oligonucleotide
tctttagtacaagcagcctg

SEQ ID NO: 2174 - DNA, 20 bp, Artificial sequence
  Synthetic oligonucleotide
gtctttagtacaagcagcct

SEQ ID NO: 2175 - DNA, 20 bp, Artificial sequence
  Synthetic oligonucleotide
ggtctttagtacaagcagcc

SEQ ID NO: 2176 - DNA, 20 bp, Artificial sequence
  Synthetic oligonucleotide
aggtctttagtacaagcagc

SEQ ID NO: 2177 - DNA, 20 bp, Artificial sequence
  Synthetic oligonucleotide
caggtctttagtacaagcag

SEQ ID NO: 2178 - DNA, 20 bp, Artificial sequence
  Synthetic oligonucleotide
tcaggtctttagtacaagca

SEQ ID NO: 2179 - DNA, 20 bp, Artificial sequence
  Synthetic oligonucleotide
gtcaggtctttagtacaagc

SEQ ID NO: 2180 - DNA, 20 bp, Artificial sequence
  Synthetic oligonucleotide
tgtcaggtctttagtacaag

SEQ ID NO: 2181 - DNA, 20 bp, Artificial sequence
  Synthetic oligonucleotide
ttgtcaggtctttagtacaa

SEQ ID NO: 2182 - DNA, 20 bp, Artificial sequence
  Synthetic oligonucleotide
gttgtcaggtctttagtaca

SEQ ID NO: 2183 - DNA, 20 bp, Artificial sequence
  Synthetic oligonucleotide
agttgtcaggtctttagtac

SEQ ID NO: 2184 - DNA, 20 bp, Artificial sequence
  Synthetic oligonucleotide
cagttgtcaggtctttagta

SEQ ID NO: 2185 - DNA, 20 bp, Artificial sequence
  Synthetic oligonucleotide
acagttgtcaggtctttagt

SEQ ID NO: 2186 - DNA, 20 bp, Artificial sequence
  Synthetic oligonucleotide
cacagttgtcaggtctttag

SEQ ID NO: 2187 - DNA, 20 bp, Artificial sequence
  Synthetic oligonucleotide
ccacagttgtcaggtcttta

SEQ ID NO: 2188 - DNA, 20 bp, Artificial sequence
  Synthetic oligonucleotide
gccacagttgtcaggtcttt

SEQ ID NO: 2189 - DNA, 20 bp, Artificial sequence
  Synthetic oligonucleotide
agccacagttgtcaggtctt

SEQ ID NO: 2190 - DNA, 20 bp, Artificial sequence
  Synthetic oligonucleotide
cagccacagttgtcaggtct

SEQ ID NO: 2191 - DNA, 20 bp, Artificial sequence
  Synthetic oligonucleotide
acagccacagttgtcaggtc

SEQ ID NO: 2192 - DNA, 20 bp, Artificial sequence
  Synthetic oligonucleotide
cacagccacagttgtcaggt

SEQ ID NO: 2193 - DNA, 20 bp, Artificial sequence
  Synthetic oligonucleotide
tccacagccacagttgtcag

SEQ ID NO: 2194 - DNA, 20 bp, Artificial sequence
  Synthetic oligonucleotide
atccacagccacagttgtca

SEQ ID NO: 2195 - DNA, 20 bp, Artificial sequence
  Synthetic oligonucleotide
catccacagccacagttgtc

SEQ ID NO: 2196 - DNA, 20 bp, Artificial sequence
  Synthetic oligonucleotide
acatccacagccacagttgt

SEQ ID NO: 2197 - DNA, 20 bp, Artificial sequence
  Synthetic oligonucleotide
aacatccacagccacagttg

SEQ ID NO: 2198 - DNA, 20 bp, Artificial sequence
  Synthetic oligonucleotide
caacatccacagccacagtt

SEQ ID NO: 2199 - DNA, 20 bp, Artificial sequence
  Synthetic oligonucleotide
acaacatccacagccacagt

SEQ ID NO: 2200 - DNA, 20 bp, Artificial sequence
  Synthetic oligonucleotide
tacaacatccacagccacag

SEQ ID NO: 2201 - DNA, 20 bp, Artificial sequence
  Synthetic oligonucleotide
gtacaacatccacagccaca

SEQ ID NO: 2202 - DNA, 20 bp, Artificial sequence
  Synthetic oligonucleotide
agtacaacatccacagccac

SEQ ID NO: 2203 - DNA, 20 bp, Artificial sequence
  Synthetic oligonucleotide
aagtacaacatccacagcca

SEQ ID NO: 2204 - DNA, 20 bp, Artificial sequence
  Synthetic oligonucleotide
caagtacaacatccacagcc

SEQ ID NO: 2205 - DNA, 20 bp, Artificial sequence
  Synthetic oligonucleotide
tcaagtacaacatccacagc

SEQ ID NO: 2206 - DNA, 20 bp, Artificial sequence
  Synthetic oligonucleotide
ctcaagtacaacatccacag

SEQ ID NO: 2207 - DNA, 20 bp, Artificial sequence
  Synthetic oligonucleotide
tctcaagtacaacatccaca

SEQ ID NO: 2208 - DNA, 20 bp, Artificial sequence
  Synthetic oligonucleotide
ttctcaagtacaacatccac

SEQ ID NO: 2209 - DNA, 20 bp, Artificial sequence
  Synthetic oligonucleotide
attctcaagtacaacatcca

SEQ ID NO: 2210 - DNA, 20 bp, Artificial sequence
  Synthetic oligonucleotide
cattctcaagtacaacatcc

SEQ ID NO: 2211 - DNA, 20 bp, Artificial sequence
  Synthetic oligonucleotide
ccattctcaagtacaacatc

SEQ ID NO: 2212 - DNA, 20 bp, Artificial sequence
  Synthetic oligonucleotide
cccattctcaagtacaacat

SEQ ID NO: 2213 - DNA, 20 bp, Artificial sequence
  Synthetic oligonucleotide
acccattctcaagtacaaca

SEQ ID NO: 2214 - DNA, 20 bp, Artificial sequence
  Synthetic oligonucleotide
gacccattctcaagtacaac

SEQ ID NO: 2215 - DNA, 20 bp, Artificial sequence
  Synthetic oligonucleotide
agacccattctcaagtacaa

SEQ ID NO: 2216 - DNA, 20 bp, Artificial sequence
  Synthetic oligonucleotide
cctgtactgagacccattct

SEQ ID NO: 2217 - DNA, 20 bp, Artificial sequence
  Synthetic oligonucleotide
acctgtactgagacccattc

SEQ ID NO: 2218 - DNA, 20 bp, Artificial sequence
  Synthetic oligonucleotide
cacctgtactgagacccatt

SEQ ID NO: 2219 - DNA, 20 bp, Artificial sequence
  Synthetic oligonucleotide
acacctgtactgagacccat

SEQ ID NO: 2220 - DNA, 20 bp, Artificial sequence
  Synthetic oligonucleotide
gacacctgtactgagaccca

SEQ ID NO: 2221 - DNA, 20 bp, Artificial sequence
  Synthetic oligonucleotide
tgacacctgtactgagaccc

SEQ ID NO: 2222 - DNA, 20 bp, Artificial sequence
  Synthetic oligonucleotide
ttgacacctgtactgagacc

SEQ ID NO: 2223 - DNA, 20 bp, Artificial sequence
  Synthetic oligonucleotide
gttgacacctgtactgagac

SEQ ID NO: 2224 - DNA, 20 bp, Artificial sequence
  Synthetic oligonucleotide
cgcttctaaaaggttgacac

SEQ ID NO: 2225 - DNA, 20 bp, Artificial sequence
  Synthetic oligonucleotide
tcgcttctaaaaggttgaca

SEQ ID NO: 2226 - DNA, 20 bp, Artificial sequence
  Synthetic oligonucleotide
gtcgcttctaaaaggttgac

SEQ ID NO: 2227 - DNA, 20 bp, Artificial sequence
  Synthetic oligonucleotide
ggtcgcttctaaaaggttga

SEQ ID NO: 2228 - DNA, 20 bp, Artificial sequence
  Synthetic oligonucleotide
aggtcgcttctaaaaggttg

SEQ ID NO: 2229 - DNA, 20 bp, Artificial sequence
  Synthetic oligonucleotide
aaggtcgcttctaaaaggtt

SEQ ID NO: 2230 - DNA, 20 bp, Artificial sequence
  Synthetic oligonucleotide
caaggtcgcttctaaaaggt

SEQ ID NO: 2231 - DNA, 20 bp, Artificial sequence
  Synthetic oligonucleotide
acaaggtcgcttctaaaagg

SEQ ID NO: 2232 - DNA, 20 bp, Artificial sequence
  Synthetic oligonucleotide
aacaaggtcgcttctaaaag

SEQ ID NO: 2233 - DNA, 20 bp, Artificial sequence
  Synthetic oligonucleotide
gaacaaggtcgcttctaaaa

SEQ ID NO: 2234 - DNA, 20 bp, Artificial sequence
  Synthetic oligonucleotide
agaacaaggtcgcttctaaa

SEQ ID NO: 2235 - DNA, 20 bp, Artificial sequence
  Synthetic oligonucleotide
aagaacaaggtcgcttctaa

SEQ ID NO: 2236 - DNA, 20 bp, Artificial sequence
  Synthetic oligonucleotide
gaagaacaaggtcgcttcta

SEQ ID NO: 2237 - DNA, 20 bp, Artificial sequence
  Synthetic oligonucleotide
ggaagaacaaggtcgcttct

SEQ ID NO: 2238 - DNA, 20 bp, Artificial sequence
  Synthetic oligonucleotide
aggaagaacaaggtcgcttc

SEQ ID NO: 2239 - DNA, 20 bp, Artificial sequence
  Synthetic oligonucleotide
aaggaagaacaaggtcgctt

SEQ ID NO: 2240 - DNA, 20 bp, Artificial sequence
  Synthetic oligonucleotide
aaaggaagaacaaggtcgct

SEQ ID NO: 2241 - DNA, 20 bp, Artificial sequence
  Synthetic oligonucleotide
gaaaggaagaacaaggtcgc

SEQ ID NO: 2242 - DNA, 20 bp, Artificial sequence
  Synthetic oligonucleotide
ggaaaggaagaacaaggtcg

SEQ ID NO: 2243 - DNA, 20 bp, Artificial sequence
  Synthetic oligonucleotide
aggaaaggaagaacaaggtc

SEQ ID NO: 2244 - DNA, 20 bp, Artificial sequence
  Synthetic oligonucleotide
aaggaaaggaagaacaaggt

SEQ ID NO: 2245 - DNA, 20 bp, Artificial sequence
  Synthetic oligonucleotide
gaaggaaaggaagaacaagg

SEQ ID NO: 2246 - DNA, 20 bp, Artificial sequence
  Synthetic oligonucleotide
ggaaggaaaggaagaacaag

SEQ ID NO: 2247 - DNA, 20 bp, Artificial sequence
  Synthetic oligonucleotide
cggaaggaaaggaagaacaa

SEQ ID NO: 2248 - DNA, 20 bp, Artificial sequence
  Synthetic oligonucleotide
tcggaaggaaaggaagaaca

SEQ ID NO: 2249 - DNA, 20 bp, Artificial sequence
  Synthetic oligonucleotide
ctcggaaggaaaggaagaac

SEQ ID NO: 2250 - DNA, 20 bp, Artificial sequence
  Synthetic oligonucleotide
tctcggaaggaaaggaagaa

SEQ ID NO: 2251 - DNA, 20 bp, Artificial sequence
  Synthetic oligonucleotide
ctctcggaaggaaaggaaga

SEQ ID NO: 2252 - DNA, 20 bp, Artificial sequence
  Synthetic oligonucleotide
gctctcggaaggaaaggaag

SEQ ID NO: 2253 - DNA, 20 bp, Artificial sequence
  Synthetic oligonucleotide
agctctcggaaggaaaggaa

SEQ ID NO: 2254 - DNA, 20 bp, Artificial sequence
  Synthetic oligonucleotide
gagctctcggaaggaaagga

SEQ ID NO: 2255 - DNA, 20 bp, Artificial sequence
  Synthetic oligonucleotide
gtctcatcacagtcctctct

SEQ ID NO: 2256 - DNA, 20 bp, Artificial sequence
  Synthetic oligonucleotide
tgtctcatcacagtcctctc

SEQ ID NO: 2257 - DNA, 20 bp, Artificial sequence
  Synthetic oligonucleotide
tgttatcctgtctcatcaca

SEQ ID NO: 2258 - DNA, 20 bp, Artificial sequence
  Synthetic oligonucleotide
ctgttatcctgtctcatcac

SEQ ID NO: 2259 - DNA, 20 bp, Artificial sequence
  Synthetic oligonucleotide
tctgttatcctgtctcatca

SEQ ID NO: 2260 - DNA, 20 bp, Artificial sequence
  Synthetic oligonucleotide
ctctgttatcctgtctcatc

SEQ ID NO: 2261 - DNA, 20 bp, Artificial sequence
  Synthetic oligonucleotide
tctctgttatcctgtctcat

SEQ ID NO: 2262 - DNA, 20 bp, Artificial sequence
  Synthetic oligonucleotide
atctctgttatcctgtctca

SEQ ID NO: 2263 - DNA, 20 bp, Artificial sequence
  Synthetic oligonucleotide
tatctctgttatcctgtctc

SEQ ID NO: 2264 - DNA, 20 bp, Artificial sequence
  Synthetic oligonucleotide
gtatctctgttatcctgtct

SEQ ID NO: 2265 - DNA, 20 bp, Artificial sequence
  Synthetic oligonucleotide
agtatctctgttatcctgtc

SEQ ID NO: 2266 - DNA, 20 bp, Artificial sequence
  Synthetic oligonucleotide
gtatcatccacagtatctct

SEQ ID NO: 2267 - DNA, 20 bp, Artificial sequence
  Synthetic oligonucleotide
agtatcatccacagtatctc

SEQ ID NO: 2268 - DNA, 20 bp, Artificial sequence
  Synthetic oligonucleotide
cagtatcatccacagtatct

SEQ ID NO: 2269 - DNA, 20 bp, Artificial sequence
  Synthetic oligonucleotide
acagtatcatccacagtatc

SEQ ID NO: 2270 - DNA, 20 bp, Artificial sequence
  Synthetic oligonucleotide
aacagtatcatccacagtat

SEQ ID NO: 2271 - DNA, 20 bp, Artificial sequence
  Synthetic oligonucleotide
taacagtatcatccacagta

SEQ ID NO: 2272 - DNA, 20 bp, Artificial sequence
  Synthetic oligonucleotide
ctaacagtatcatccacagt

SEQ ID NO: 2273 - DNA, 20 bp, Artificial sequence
  Synthetic oligonucleotide
actaacagtatcatccacag

SEQ ID NO: 2274 - DNA, 20 bp, Artificial sequence
  Synthetic oligonucleotide
tactaacagtatcatccaca

SEQ ID NO: 2275 - DNA, 20 bp, Artificial sequence
  Synthetic oligonucleotide
ctactaacagtatcatccac

SEQ ID NO: 2276 - DNA, 20 bp, Artificial sequence
  Synthetic oligonucleotide
gctactaacagtatcatcca

SEQ ID NO: 2277 - DNA, 20 bp, Artificial sequence
  Synthetic oligonucleotide
cgctactaacagtatcatcc

SEQ ID NO: 2278 - DNA, 20 bp, Artificial sequence
  Synthetic oligonucleotide
tcgctactaacagtatcatc

SEQ ID NO: 2279 - DNA, 20 bp, Artificial sequence
  Synthetic oligonucleotide
ttcgctactaacagtatcat

SEQ ID NO: 2280 - DNA, 20 bp, Artificial sequence
  Synthetic oligonucleotide
attcgctactaacagtatca

SEQ ID NO: 2281 - DNA, 20 bp, Artificial sequence
  Synthetic oligonucleotide
gattcgctactaacagtatc

SEQ ID NO: 2282 - DNA, 20 bp, Artificial sequence
  Synthetic oligonucleotide
cgattcgctactaacagtat

SEQ ID NO: 2283 - DNA, 20 bp, Artificial sequence
  Synthetic oligonucleotide
acaaagactgaagcgattcg

SEQ ID NO: 2284 - DNA, 20 bp, Artificial sequence
  Synthetic oligonucleotide
aacaaagactgaagcgattc

SEQ ID NO: 2285 - DNA, 20 bp, Artificial sequence
  Synthetic oligonucleotide
gaacaaagactgaagcgatt

SEQ ID NO: 2286 - DNA, 20 bp, Artificial sequence
  Synthetic oligonucleotide
agaacaaagactgaagcgat

SEQ ID NO: 2287 - DNA, 20 bp, Artificial sequence
  Synthetic oligonucleotide
gagaacaaagactgaagcga

SEQ ID NO: 2288 - DNA, 20 bp, Artificial sequence
  Synthetic oligonucleotide
tgagaacaaagactgaagcg

SEQ ID NO: 2289 - DNA, 20 bp, Artificial sequence
  Synthetic oligonucleotide
ctgagaacaaagactgaagc

SEQ ID NO: 2290 - DNA, 20 bp, Artificial sequence
  Synthetic oligonucleotide
tctgagaacaaagactgaag

SEQ ID NO: 2291 - DNA, 20 bp, Artificial sequence
  Synthetic oligonucleotide
ttctgagaacaaagactgaa

SEQ ID NO: 2292 - DNA, 20 bp, Artificial sequence
  Synthetic oligonucleotide
attctgagaacaaagactga

SEQ ID NO: 2293 - DNA, 20 bp, Artificial sequence
  Synthetic oligonucleotide
cattctgagaacaaagactg

SEQ ID NO: 2294 - DNA, 20 bp, Artificial sequence
  Synthetic oligonucleotide
ccattctgagaacaaagact

SEQ ID NO: 2295 - DNA, 20 bp, Artificial sequence
  Synthetic oligonucleotide
cccattctgagaacaaagac

SEQ ID NO: 2296 - DNA, 20 bp, Artificial sequence
  Synthetic oligonucleotide
tcccattctgagaacaaaga

SEQ ID NO: 2297 - DNA, 20 bp, Artificial sequence
  Synthetic oligonucleotide
gtcccattctgagaacaaag

SEQ ID NO: 2298 - DNA, 20 bp, Artificial sequence
  Synthetic oligonucleotide
tgtcccattctgagaacaaa

SEQ ID NO: 2299 - DNA, 20 bp, Artificial sequence
  Synthetic oligonucleotide
ttgtcccattctgagaacaa

SEQ ID NO: 2300 - DNA, 20 bp, Artificial sequence
  Synthetic oligonucleotide
attgtcccattctgagaaca

SEQ ID NO: 2301 - DNA, 20 bp, Artificial sequence
  Synthetic oligonucleotide
gattgtcccattctgagaac

SEQ ID NO: 2302 - DNA, 20 bp, Artificial sequence
  Synthetic oligonucleotide
ggattgtcccattctgagaa

SEQ ID NO: 2303 - DNA, 20 bp, Artificial sequence
  Synthetic oligonucleotide
tggattgtcccattctgaga

SEQ ID NO: 2304 - DNA, 20 bp, Artificial sequence
  Synthetic oligonucleotide
ctggattgtcccattctgag

SEQ ID NO: 2305 - DNA, 20 bp, Artificial sequence
  Synthetic oligonucleotide
actggattgtcccattctga

SEQ ID NO: 2306 - DNA, 20 bp, Artificial sequence
  Synthetic oligonucleotide
tactggattgtcccattctg

SEQ ID NO: 2307 - DNA, 20 bp, Artificial sequence
  Synthetic oligonucleotide
atactggattgtcccattct

SEQ ID NO: 2308 - DNA, 20 bp, Artificial sequence
  Synthetic oligonucleotide
aatactggattgtcccattc

SEQ ID NO: 2309 - DNA, 20 bp, Artificial sequence
  Synthetic oligonucleotide
aaatactggattgtcccatt

SEQ ID NO: 2310 - DNA, 20 bp, Artificial sequence
  Synthetic oligonucleotide
caaatactggattgtcccat

SEQ ID NO: 2311 - DNA, 20 bp, Artificial sequence
  Synthetic oligonucleotide
gcaaatactggattgtccca

SEQ ID NO: 2312 - DNA, 20 bp, Artificial sequence
  Synthetic oligonucleotide
ggcaaatactggattgtccc

SEQ ID NO: 2313 - DNA, 20 bp, Artificial sequence
  Synthetic oligonucleotide
cgggcaaatactggattgtc

SEQ ID NO: 2314 - DNA, 20 bp, Artificial sequence
  Synthetic oligonucleotide
acgggcaaatactggattgt

SEQ ID NO: 2315 - DNA, 20 bp, Artificial sequence
  Synthetic oligonucleotide
aacgggcaaatactggattg

SEQ ID NO: 2316 - DNA, 20 bp, Artificial sequence
  Synthetic oligonucleotide
taacgggcaaatactggatt

SEQ ID NO: 2317 - DNA, 20 bp, Artificial sequence
  Synthetic oligonucleotide
ataacgggcaaatactggat

SEQ ID NO: 2318 - DNA, 20 bp, Artificial sequence
  Synthetic oligonucleotide
gataacgggcaaatactgga

SEQ ID NO: 2319 - DNA, 20 bp, Artificial sequence
  Synthetic oligonucleotide
ggataacgggcaaatactgg

SEQ ID NO: 2320 - DNA, 20 bp, Artificial sequence
  Synthetic oligonucleotide
tggataacgggcaaatactg

SEQ ID NO: 2321 - DNA, 20 bp, Artificial sequence
  Synthetic oligonucleotide
ctggataacgggcaaatact

SEQ ID NO: 2322 - DNA, 20 bp, Artificial sequence
  Synthetic oligonucleotide
tctggataacgggcaaatac

SEQ ID NO: 2323 - DNA, 20 bp, Artificial sequence
  Synthetic oligonucleotide
ctctggataacgggcaaata

SEQ ID NO: 2324 - DNA, 20 bp, Artificial sequence
  Synthetic oligonucleotide
cctctggataacgggcaaat

SEQ ID NO: 2325 - DNA, 20 bp, Artificial sequence
  Synthetic oligonucleotide
acctctggataacgggcaaa

SEQ ID NO: 2326 - DNA, 20 bp, Artificial sequence
  Synthetic oligonucleotide
aacctctggataacgggcaa

SEQ ID NO: 2327 - DNA, 20 bp, Artificial sequence
  Synthetic oligonucleotide
caacctctggataacgggca

SEQ ID NO: 2328 - DNA, 20 bp, Artificial sequence
  Synthetic oligonucleotide
agcaacctctggataacggg

SEQ ID NO: 2329 - DNA, 20 bp, Artificial sequence
  Synthetic oligonucleotide
cagcaacctctggataacgg

SEQ ID NO: 2330 - DNA, 20 bp, Artificial sequence
  Synthetic oligonucleotide
ttacatcaacagcaacctct

SEQ ID NO: 2331 - DNA, 20 bp, Artificial sequence
  Synthetic oligonucleotide
cttacatcaacagcaacctc

SEQ ID NO: 2332 - DNA, 20 bp, Artificial sequence
  Synthetic oligonucleotide
gcttacatcaacagcaacct

SEQ ID NO: 2333 - DNA, 20 bp, Artificial sequence
  Synthetic oligonucleotide
ccactgcttacatcaacagc

SEQ ID NO: 2334 - DNA, 20 bp, Artificial sequence
  Synthetic oligonucleotide
gccactgcttacatcaacag

SEQ ID NO: 2335 - DNA, 20 bp, Artificial sequence
  Synthetic oligonucleotide
tttaactgctaagctctcag

SEQ ID NO: 2336 - DNA, 20 bp, Artificial sequence
  Synthetic oligonucleotide
ttttaactgctaagctctca

SEQ ID NO: 2337 - DNA, 20 bp, Artificial sequence
  Synthetic oligonucleotide
attttaactgctaagctctc

SEQ ID NO: 2338 - DNA, 20 bp, Artificial sequence
  Synthetic oligonucleotide
aattttaactgctaagctct

SEQ ID NO: 2339 - DNA, 20 bp, Artificial sequence
  Synthetic oligonucleotide
gaattttaactgctaagctc

SEQ ID NO: 2340 - DNA, 20 bp, Artificial sequence
  Synthetic oligonucleotide
tgaattttaactgctaagct

SEQ ID NO: 2341 - DNA, 20 bp, Artificial sequence
  Synthetic oligonucleotide
gtgaattttaactgctaagc

SEQ ID NO: 2342 - DNA, 20 bp, Artificial sequence
  Synthetic oligonucleotide
tgtgaattttaactgctaag

SEQ ID NO: 2343 - DNA, 20 bp, Artificial sequence
  Synthetic oligonucleotide
ttgtgaattttaactgctaa

SEQ ID NO: 2344 - DNA, 20 bp, Artificial sequence
  Synthetic oligonucleotide
gttgtgaattttaactgcta

SEQ ID NO: 2345 - DNA, 20 bp, Artificial sequence
  Synthetic oligonucleotide
tgttgtgaattttaactgct

SEQ ID NO: 2346 - DNA, 20 bp, Artificial sequence
  Synthetic oligonucleotide
atgttgtgaattttaactgc

SEQ ID NO: 2347 - DNA, 20 bp, Artificial sequence
  Synthetic oligonucleotide
gatgttgtgaattttaactg

SEQ ID NO: 2348 - DNA, 20 bp, Artificial sequence
  Synthetic oligonucleotide
agatgttgtgaattttaact

SEQ ID NO: 2349 - DNA, 20 bp, Artificial sequence
  Synthetic oligonucleotide
aagatgttgtgaattttaac

SEQ ID NO: 2350 - DNA, 20 bp, Artificial sequence
  Synthetic oligonucleotide
caagatgttgtgaattttaa

SEQ ID NO: 2351 - DNA, 20 bp, Artificial sequence
  Synthetic oligonucleotide
ggtgaaacgatagggataca

SEQ ID NO: 2352 - DNA, 20 bp, Artificial sequence
  Synthetic oligonucleotide
tggtgaaacgatagggatac

SEQ ID NO: 2353 - DNA, 20 bp, Artificial sequence
  Synthetic oligonucleotide
ttggtgaaacgatagggata

SEQ ID NO: 2354 - DNA, 20 bp, Artificial sequence
  Synthetic oligonucleotide
tttggtgaaacgatagggat

SEQ ID NO: 2355 - DNA, 20 bp, Artificial sequence
  Synthetic oligonucleotide
ctttggtgaaacgataggga

SEQ ID NO: 2356 - DNA, 20 bp, Artificial sequence
  Synthetic oligonucleotide
cctttggtgaaacgataggg

SEQ ID NO: 2357 - DNA, 20 bp, Artificial sequence
  Synthetic oligonucleotide
ttcctttggtgaaacgatag

SEQ ID NO: 2358 - DNA, 20 bp, Artificial sequence
  Synthetic oligonucleotide
attcctttggtgaaacgata

SEQ ID NO: 2359 - DNA, 20 bp, Artificial sequence
  Synthetic oligonucleotide
cattcctttggtgaaacgat

SEQ ID NO: 2360 - DNA, 20 bp, Artificial sequence
  Synthetic oligonucleotide
tcattcctttggtgaaacga

SEQ ID NO: 2361 - DNA, 20 bp, Artificial sequence
  Synthetic oligonucleotide
atcattcctttggtgaaacg

SEQ ID NO: 2362 - DNA, 20 bp, Artificial sequence
  Synthetic oligonucleotide
aatcattcctttggtgaaac

SEQ ID NO: 2363 - DNA, 20 bp, Artificial sequence
  Synthetic oligonucleotide
gaatcattcctttggtgaaa

SEQ ID NO: 2364 - DNA, 20 bp, Artificial sequence
  Synthetic oligonucleotide
tgaatcattcctttggtgaa

SEQ ID NO: 2365 - DNA, 20 bp, Artificial sequence
  Synthetic oligonucleotide
atgaatcattcctttggtga

SEQ ID NO: 2366 - DNA, 20 bp, Artificial sequence
  Synthetic oligonucleotide
aatgaatcattcctttggtg

SEQ ID NO: 2367 - DNA, 20 bp, Artificial sequence
  Synthetic oligonucleotide
cctgcattgaatgaatcatt

SEQ ID NO: 2368 - DNA, 20 bp, Artificial sequence
  Synthetic oligonucleotide
acctgcattgaatgaatcat

SEQ ID NO: 2369 - DNA, 20 bp, Artificial sequence
  Synthetic oligonucleotide
aacctgcattgaatgaatca

SEQ ID NO: 2370 - DNA, 20 bp, Artificial sequence
  Synthetic oligonucleotide
gaacctgcattgaatgaatc

SEQ ID NO: 2371 - DNA, 20 bp, Artificial sequence
  Synthetic oligonucleotide
agaacctgcattgaatgaat

SEQ ID NO: 2372 - DNA, 20 bp, Artificial sequence
  Synthetic oligonucleotide
gagaacctgcattgaatgaa

SEQ ID NO: 2373 - DNA, 20 bp, Artificial sequence
  Synthetic oligonucleotide
ggagaacctgcattgaatga

SEQ ID NO: 2374 - DNA, 20 bp, Artificial sequence
  Synthetic oligonucleotide
tatctacttgctggagaacc

SEQ ID NO: 2375 - DNA, 20 bp, Artificial sequence
  Synthetic oligonucleotide
ttatctacttgctggagaac

SEQ ID NO: 2376 - DNA, 20 bp, Artificial sequence
  Synthetic oligonucleotide
gttatctacttgctggagaa

SEQ ID NO: 2377 - DNA, 20 bp, Artificial sequence
  Synthetic oligonucleotide
tgttatctacttgctggaga

SEQ ID NO: 2378 - DNA, 20 bp, Artificial sequence
  Synthetic oligonucleotide
ttgttatctacttgctggag

SEQ ID NO: 2379 - DNA, 20 bp, Artificial sequence
  Synthetic oligonucleotide
cttgttatctacttgctgga

SEQ ID NO: 2380 - DNA, 20 bp, Artificial sequence
  Synthetic oligonucleotide
acttgttatctacttgctgg

SEQ ID NO: 2381 - DNA, 20 bp, Artificial sequence
  Synthetic oligonucleotide
aacttgttatctacttgctg

SEQ ID NO: 2382 - DNA, 20 bp, Artificial sequence
  Synthetic oligonucleotide
aaacttgttatctacttgct

SEQ ID NO: 2383 - DNA, 20 bp, Artificial sequence
  Synthetic oligonucleotide
taaacttgttatctacttgc

SEQ ID NO: 2384 - DNA, 20 bp, Artificial sequence
  Synthetic oligonucleotide
ataaacttgttatctacttg

SEQ ID NO: 2385 - DNA, 20 bp, Artificial sequence
  Synthetic oligonucleotide
caataaacttgttatctact

SEQ ID NO: 2386 - DNA, 20 bp, Artificial sequence
  Synthetic oligonucleotide
gcaataaacttgttatctac

SEQ ID NO: 2387 - DNA, 20 bp, Artificial sequence
  Synthetic oligonucleotide
ggcaataaacttgttatcta

SEQ ID NO: 2388 - DNA, 20 bp, Artificial sequence
  Synthetic oligonucleotide
aggcaataaacttgttatct

SEQ ID NO: 2389 - DNA, 20 bp, Artificial sequence
  Synthetic oligonucleotide
caggcaataaacttgttatc

SEQ ID NO: 2390 - DNA, 20 bp, Artificial sequence
  Synthetic oligonucleotide
acaggcaataaacttgttat

SEQ ID NO: 2391 - DNA, 20 bp, Artificial sequence
  Synthetic oligonucleotide
aacaggcaataaacttgtta

SEQ ID NO: 2392 - DNA, 20 bp, Artificial sequence
  Synthetic oligonucleotide
aaacaggcaataaacttgtt

SEQ ID NO: 2393 - DNA, 20 bp, Artificial sequence
  Synthetic oligonucleotide
caaacaggcaataaacttgt

SEQ ID NO: 2394 - DNA, 20 bp, Artificial sequence
  Synthetic oligonucleotide
tcaaacaggcaataaacttg

SEQ ID NO: 2395 - DNA, 20 bp, Artificial sequence
  Synthetic oligonucleotide
atcaaacaggcaataaactt

SEQ ID NO: 2396 - DNA, 20 bp, Artificial sequence
  Synthetic oligonucleotide
catcaaacaggcaataaact

SEQ ID NO: 2397 - DNA, 20 bp, Artificial sequence
  Synthetic oligonucleotide
tcatcaaacaggcaataaac

SEQ ID NO: 2398 - DNA, 20 bp, Artificial sequence
  Synthetic oligonucleotide
ctcatcaaacaggcaataaa

SEQ ID NO: 2399 - DNA, 20 bp, Artificial sequence
  Synthetic oligonucleotide
gctcatcaaacaggcaataa

SEQ ID NO: 2400 - DNA, 20 bp, Artificial sequence
  Synthetic oligonucleotide
tgctcatcaaacaggcaata

SEQ ID NO: 2401 - DNA, 20 bp, Artificial sequence
  Synthetic oligonucleotide
gtgctcatcaaacaggcaat

SEQ ID NO: 2402 - DNA, 20 bp, Artificial sequence
  Synthetic oligonucleotide
agtgctcatcaaacaggcaa

SEQ ID NO: 2403 - DNA, 20 bp, Artificial sequence
  Synthetic oligonucleotide
tagtgctcatcaaacaggca

SEQ ID NO: 2404 - DNA, 20 bp, Artificial sequence
  Synthetic oligonucleotide
ttagtgctcatcaaacaggc

SEQ ID NO: 2405 - DNA, 20 bp, Artificial sequence
  Synthetic oligonucleotide
cttagtgctcatcaaacagg

SEQ ID NO: 2406 - DNA, 20 bp, Artificial sequence
  Synthetic oligonucleotide
tcttagtgctcatcaaacag

SEQ ID NO: 2407 - DNA, 20 bp, Artificial sequence
  Synthetic oligonucleotide
gtcttagtgctcatcaaaca

SEQ ID NO: 2408 - DNA, 20 bp, Artificial sequence
  Synthetic oligonucleotide
agtcttagtgctcatcaaac

SEQ ID NO: 2409 - DNA, 20 bp, Artificial sequence
  Synthetic oligonucleotide
cagtcttagtgctcatcaaa

SEQ ID NO: 2410 - DNA, 20 bp, Artificial sequence
  Synthetic oligonucleotide
tcagtcttagtgctcatcaa

SEQ ID NO: 2411 - DNA, 20 bp, Artificial sequence
  Synthetic oligonucleotide
ttcagtcttagtgctcatca

SEQ ID NO: 2412 - DNA, 20 bp, Artificial sequence
  Synthetic oligonucleotide
cttcagtcttagtgctcatc

SEQ ID NO: 2413 - DNA, 20 bp, Artificial sequence
  Synthetic oligonucleotide
tcttcagtcttagtgctcat

SEQ ID NO: 2414 - DNA, 20 bp, Artificial sequence
  Synthetic oligonucleotide
ctcttcagtcttagtgctca

SEQ ID NO: 2415 - DNA, 20 bp, Artificial sequence
  Synthetic oligonucleotide
tctcttcagtcttagtgctc

SEQ ID NO: 2416 - DNA, 20 bp, Artificial sequence
  Synthetic oligonucleotide
ttctcttcagtcttagtgct

SEQ ID NO: 2417 - DNA, 20 bp, Artificial sequence
  Synthetic oligonucleotide
attctcttcagtcttagtgc

SEQ ID NO: 2418 - DNA, 20 bp, Artificial sequence
  Synthetic oligonucleotide
cattctcttcagtcttagtg

SEQ ID NO: 2419 - DNA, 20 bp, Artificial sequence
  Synthetic oligonucleotide
ccattctcttcagtcttagt

SEQ ID NO: 2420 - DNA, 20 bp, Artificial sequence
  Synthetic oligonucleotide
gccattctcttcagtcttag

SEQ ID NO: 2421 - DNA, 20 bp, Artificial sequence
  Synthetic oligonucleotide
cgccattctcttcagtctta

SEQ ID NO: 2422 - DNA, 20 bp, Artificial sequence
  Synthetic oligonucleotide
tcgccattctcttcagtctt

SEQ ID NO: 2423 - DNA, 20 bp, Artificial sequence
  Synthetic oligonucleotide
ctcgccattctcttcagtct

SEQ ID NO: 2424 - DNA, 20 bp, Artificial sequence
  Synthetic oligonucleotide
cctcgccattctcttcagtc

SEQ ID NO: 2425 - DNA, 20 bp, Artificial sequence
  Synthetic oligonucleotide
gcctcgccattctcttcagt

SEQ ID NO: 2426 - DNA, 20 bp, Artificial sequence
  Synthetic oligonucleotide
tgcctcgccattctcttcag

SEQ ID NO: 2427 - DNA, 20 bp, Artificial sequence
  Synthetic oligonucleotide
ctgcctcgccattctcttca

SEQ ID NO: 2428 - DNA, 20 bp, Artificial sequence
  Synthetic oligonucleotide
acctgcctcgccattctctt

SEQ ID NO: 2429 - DNA, 20 bp, Artificial sequence
  Synthetic oligonucleotide
agctgctccagacgtatacg

SEQ ID NO: 2430 - DNA, 20 bp, Artificial sequence
  Synthetic oligonucleotide
aagctgctccagacgtatac

SEQ ID NO: 2431 - DNA, 20 bp, Artificial sequence
  Synthetic oligonucleotide
taagctgctccagacgtata

SEQ ID NO: 2432 - DNA, 20 bp, Artificial sequence
  Synthetic oligonucleotide
ataagctgctccagacgtat

SEQ ID NO: 2433 - DNA, 20 bp, Artificial sequence
  Synthetic oligonucleotide
gataagctgctccagacgta

SEQ ID NO: 2434 - DNA, 20 bp, Artificial sequence
  Synthetic oligonucleotide
tgataagctgctccagacgt

SEQ ID NO: 2435 - DNA, 20 bp, Artificial sequence
  Synthetic oligonucleotide
atgataagctgctccagacg

SEQ ID NO: 2436 - DNA, 20 bp, Artificial sequence
  Synthetic oligonucleotide
aatgataagctgctccagac

SEQ ID NO: 2437 - DNA, 20 bp, Artificial sequence
  Synthetic oligonucleotide
caatgataagctgctccaga

SEQ ID NO: 2438 - DNA, 20 bp, Artificial sequence
  Synthetic oligonucleotide
tcaatgataagctgctccag

SEQ ID NO: 2439 - DNA, 20 bp, Artificial sequence
  Synthetic oligonucleotide
atcaatgataagctgctcca

SEQ ID NO: 2440 - DNA, 20 bp, Artificial sequence
  Synthetic oligonucleotide
aatcaatgataagctgctcc

SEQ ID NO: 2441 - DNA, 20 bp, Artificial sequence
  Synthetic oligonucleotide
gaatcaatgataagctgctc

SEQ ID NO: 2442 - DNA, 20 bp, Artificial sequence
  Synthetic oligonucleotide
ggaatcaatgataagctgct

SEQ ID NO: 2443 - DNA, 20 bp, Artificial sequence
  Synthetic oligonucleotide
aggaatcaatgataagctgc

SEQ ID NO: 2444 - DNA, 20 bp, Artificial sequence
  Synthetic oligonucleotide
taggaatcaatgataagctg

SEQ ID NO: 2445 - DNA, 20 bp, Artificial sequence
  Synthetic oligonucleotide
gtaggaatcaatgataagct

SEQ ID NO: 2446 - DNA, 20 bp, Artificial sequence
  Synthetic oligonucleotide
cgtaggaatcaatgataagc

SEQ ID NO: 2447 - DNA, 20 bp, Artificial sequence
  Synthetic oligonucleotide
tcgtaggaatcaatgataag

SEQ ID NO: 2448 - DNA, 20 bp, Artificial sequence
  Synthetic oligonucleotide
ctcgtaggaatcaatgataa

SEQ ID NO: 2449 - DNA, 20 bp, Artificial sequence
  Synthetic oligonucleotide
tctcgtaggaatcaatgata

SEQ ID NO: 2450 - DNA, 20 bp, Artificial sequence
  Synthetic oligonucleotide
ttctcgtaggaatcaatgat

SEQ ID NO: 2451 - DNA, 20 bp, Artificial sequence
  Synthetic oligonucleotide
cttctcgtaggaatcaatga

SEQ ID NO: 2452 - DNA, 20 bp, Artificial sequence
  Synthetic oligonucleotide
gcttctcgtaggaatcaatg

SEQ ID NO: 2453 - DNA, 20 bp, Artificial sequence
  Synthetic oligonucleotide
tgcttctcgtaggaatcaat

SEQ ID NO: 2454 - DNA, 20 bp, Artificial sequence
  Synthetic oligonucleotide
ttgcttctcgtaggaatcaa

SEQ ID NO: 2455 - DNA, 20 bp, Artificial sequence
  Synthetic oligonucleotide
gttgcttctcgtaggaatca

SEQ ID NO: 2456 - DNA, 20 bp, Artificial sequence
  Synthetic oligonucleotide
tgttgcttctcgtaggaatc

SEQ ID NO: 2457 - DNA, 20 bp, Artificial sequence
  Synthetic oligonucleotide
ctgttgcttctcgtaggaat

SEQ ID NO: 2458 - DNA, 20 bp, Artificial sequence
  Synthetic oligonucleotide
cctgttgcttctcgtaggaa

SEQ ID NO: 2459 - DNA, 20 bp, Artificial sequence
  Synthetic oligonucleotide
gcctgttgcttctcgtagga

SEQ ID NO: 2460 - DNA, 20 bp, Artificial sequence
  Synthetic oligonucleotide
tttccgaccagagccttgtg

SEQ ID NO: 2461 - DNA, 20 bp, Artificial sequence
  Synthetic oligonucleotide
ttttccgaccagagccttgt

SEQ ID NO: 2462 - DNA, 20 bp, Artificial sequence
  Synthetic oligonucleotide
tttttccgaccagagccttg

SEQ ID NO: 2463 - DNA, 20 bp, Artificial sequence
  Synthetic oligonucleotide
agtagaagacagtaattttt

SEQ ID NO: 2464 - DNA, 20 bp, Artificial sequence
  Synthetic oligonucleotide
gagtagaagacagtaatttt

SEQ ID NO: 2465 - DNA, 20 bp, Artificial sequence
  Synthetic oligonucleotide
agagtagaagacagtaattt

SEQ ID NO: 2466 - DNA, 20 bp, Artificial sequence
  Synthetic oligonucleotide
tagagtagaagacagtaatt

SEQ ID NO: 2467 - DNA, 20 bp, Artificial sequence
  Synthetic oligonucleotide
ttagagtagaagacagtaat

SEQ ID NO: 2468 - DNA, 20 bp, Artificial sequence
  Synthetic oligonucleotide
attagagtagaagacagtaa

SEQ ID NO: 2469 - DNA, 20 bp, Artificial sequence
  Synthetic oligonucleotide
aattagagtagaagacagta

SEQ ID NO: 2470 - DNA, 20 bp, Artificial sequence
  Synthetic oligonucleotide
gaattagagtagaagacagt

SEQ ID NO: 2471 - DNA, 20 bp, Artificial sequence
  Synthetic oligonucleotide
ggaattagagtagaagacag

SEQ ID NO: 2472 - DNA, 20 bp, Artificial sequence
  Synthetic oligonucleotide
aggaattagagtagaagaca

SEQ ID NO: 2473 - DNA, 20 bp, Artificial sequence
  Synthetic oligonucleotide
gaggaattagagtagaagac

SEQ ID NO: 2474 - DNA, 20 bp, Artificial sequence
  Synthetic oligonucleotide
ggaggaattagagtagaaga

SEQ ID NO: 2475 - DNA, 20 bp, Artificial sequence
  Synthetic oligonucleotide
cggaggaattagagtagaag

SEQ ID NO: 2476 - DNA, 20 bp, Artificial sequence
  Synthetic oligonucleotide
gcggaggaattagagtagaa

SEQ ID NO: 2477 - DNA, 20 bp, Artificial sequence
  Synthetic oligonucleotide
agcggaggaattagagtaga

SEQ ID NO: 2478 - DNA, 20 bp, Artificial sequence
  Synthetic oligonucleotide
tagcggaggaattagagtag

SEQ ID NO: 2479 - DNA, 20 bp, Artificial sequence
  Synthetic oligonucleotide
ctagcggaggaattagagta

SEQ ID NO: 2480 - DNA, 20 bp, Artificial sequence
  Synthetic oligonucleotide
tctagcggaggaattagagt

SEQ ID NO: 2481 - DNA, 20 bp, Artificial sequence
  Synthetic oligonucleotide
tcactgttatctctagcgga

SEQ ID NO: 2482 - DNA, 20 bp, Artificial sequence
  Synthetic oligonucleotide
gtcactgttatctctagcgg

SEQ ID NO: 2483 - DNA, 20 bp, Artificial sequence
  Synthetic oligonucleotide
tgtcactgttatctctagcg

SEQ ID NO: 2484 - DNA, 20 bp, Artificial sequence
  Synthetic oligonucleotide
ctgtcactgttatctctagc

SEQ ID NO: 2485 - DNA, 20 bp, Artificial sequence
  Synthetic oligonucleotide
tctgtcactgttatctctag

SEQ ID NO: 2486 - DNA, 20 bp, Artificial sequence
  Synthetic oligonucleotide
ctctgtcactgttatctcta

SEQ ID NO: 2487 - DNA, 20 bp, Artificial sequence
  Synthetic oligonucleotide
cctctgtcactgttatctct

SEQ ID NO: 2488 - DNA, 20 bp, Artificial sequence
  Synthetic oligonucleotide
tcctctgtcactgttatctc

SEQ ID NO: 2489 - DNA, 20 bp, Artificial sequence
  Synthetic oligonucleotide
ttcctctgtcactgttatct

SEQ ID NO: 2490 - DNA, 20 bp, Artificial sequence
  Synthetic oligonucleotide
gttcctctgtcactgttatc

SEQ ID NO: 2491 - DNA, 20 bp, Artificial sequence
  Synthetic oligonucleotide
tgttcctctgtcactgttat

SEQ ID NO: 2492 - DNA, 20 bp, Artificial sequence
  Synthetic oligonucleotide
ttgttcctctgtcactgtta

SEQ ID NO: 2493 - DNA, 20 bp, Artificial sequence
  Synthetic oligonucleotide
tttgttcctctgtcactgtt

SEQ ID NO: 2494 - DNA, 20 bp, Artificial sequence
  Synthetic oligonucleotide
ctttgttcctctgtcactgt

SEQ ID NO: 2495 - DNA, 20 bp, Artificial sequence
  Synthetic oligonucleotide
cctttgttcctctgtcactg

SEQ ID NO: 2496 - DNA, 20 bp, Artificial sequence
  Synthetic oligonucleotide
tcctttgttcctctgtcact

SEQ ID NO: 2497 - DNA, 20 bp, Artificial sequence
  Synthetic oligonucleotide
ctcctttgttcctctgtcac

SEQ ID NO: 2498 - DNA, 20 bp, Artificial sequence
  Synthetic oligonucleotide
tctcctttgttcctctgtca

SEQ ID NO: 2499 - DNA, 20 bp, Artificial sequence
  Synthetic oligonucleotide
gtctcctttgttcctctgtc

SEQ ID NO: 2500 - DNA, 20 bp, Artificial sequence
  Synthetic oligonucleotide
agtctcctttgttcctctgt

SEQ ID NO: 2501 - DNA, 20 bp, Artificial sequence
  Synthetic oligonucleotide
gagtctcctttgttcctctg

SEQ ID NO: 2502 - DNA, 20 bp, Artificial sequence
  Synthetic oligonucleotide
agagtctcctttgttcctct

SEQ ID NO: 2503 - DNA, 20 bp, Artificial sequence
  Synthetic oligonucleotide
aagagtctcctttgttcctc

SEQ ID NO: 2504 - DNA, 20 bp, Artificial sequence
  Synthetic oligonucleotide
taagagtctcctttgttcct

SEQ ID NO: 2505 - DNA, 20 bp, Artificial sequence
  Synthetic oligonucleotide
ataagagtctcctttgttcc

SEQ ID NO: 2506 - DNA, 20 bp, Artificial sequence
  Synthetic oligonucleotide
cataagagtctcctttgttc

SEQ ID NO: 2507 - DNA, 20 bp, Artificial sequence
  Synthetic oligonucleotide
ccataagagtctcctttgtt

SEQ ID NO: 2508 - DNA, 20 bp, Artificial sequence
  Synthetic oligonucleotide
accataagagtctcctttgt

SEQ ID NO: 2509 - DNA, 20 bp, Artificial sequence
  Synthetic oligonucleotide
caccataagagtctcctttg

SEQ ID NO: 2510 - DNA, 20 bp, Artificial sequence
  Synthetic oligonucleotide
acaccataagagtctccttt

SEQ ID NO: 2511 - DNA, 20 bp, Artificial sequence
  Synthetic oligonucleotide
aacaccataagagtctcctt

SEQ ID NO: 2512 - DNA, 20 bp, Artificial sequence
  Synthetic oligonucleotide
taacaccataagagtctcct

SEQ ID NO: 2513 - DNA, 20 bp, Artificial sequence
  Synthetic oligonucleotide
gtaacaccataagagtctcc

SEQ ID NO: 2514 - DNA, 20 bp, Artificial sequence
  Synthetic oligonucleotide
ggtaacaccataagagtctc

SEQ ID NO: 2515 - DNA, 20 bp, Artificial sequence
  Synthetic oligonucleotide
ttccagatttttgtggtaac

SEQ ID NO: 2516 - DNA, 20 bp, Artificial sequence
  Synthetic oligonucleotide
cttccagatttttgtggtaa

SEQ ID NO: 2517 - DNA, 20 bp, Artificial sequence
  Synthetic oligonucleotide
tcttccagatttttgtggta

SEQ ID NO: 2518 - DNA, 20 bp, Artificial sequence
  Synthetic oligonucleotide
atcttccagatttttgtggt

SEQ ID NO: 2519 - DNA, 20 bp, Artificial sequence
  Synthetic oligonucleotide
gatcttccagatttttgtgg

SEQ ID NO: 2520 - DNA, 20 bp, Artificial sequence
  Synthetic oligonucleotide
agatcttccagatttttgtg

SEQ ID NO: 2521 - DNA, 20 bp, Artificial sequence
  Synthetic oligonucleotide
cagatcttccagatttttgt

SEQ ID NO: 2522 - DNA, 20 bp, Artificial sequence
  Synthetic oligonucleotide
ccagatcttccagatttttg

SEQ ID NO: 2523 - DNA, 20 bp, Artificial sequence
  Synthetic oligonucleotide
cccagatcttccagattttt

SEQ ID NO: 2524 - DNA, 20 bp, Artificial sequence
  Synthetic oligonucleotide
gcccagatcttccagatttt

SEQ ID NO: 2525 - DNA, 20 bp, Artificial sequence
  Synthetic oligonucleotide
ggcccagatcttccagattt

SEQ ID NO: 2526 - DNA, 20 bp, Artificial sequence
  Synthetic oligonucleotide
aggcccagatcttccagatt

SEQ ID NO: 2527 - DNA, 20 bp, Artificial sequence
  Synthetic oligonucleotide
aaggcccagatcttccagat

SEQ ID NO: 2528 - DNA, 20 bp, Artificial sequence
  Synthetic oligonucleotide
caaggcccagatcttccaga

SEQ ID NO: 2529 - DNA, 20 bp, Artificial sequence
  Synthetic oligonucleotide
tcaaggcccagatcttccag

SEQ ID NO: 2530 - DNA, 20 bp, Artificial sequence
  Synthetic oligonucleotide
ttcaaggcccagatcttcca

SEQ ID NO: 2531 - DNA, 20 bp, Artificial sequence
  Synthetic oligonucleotide
attcaaggcccagatcttcc

SEQ ID NO: 2532 - DNA, 20 bp, Artificial sequence
  Synthetic oligonucleotide
aattcaaggcccagatcttc

SEQ ID NO: 2533 - DNA, 20 bp, Artificial sequence
  Synthetic oligonucleotide
aaattcaaggcccagatctt

SEQ ID NO: 2534 - DNA, 20 bp, Artificial sequence
  Synthetic oligonucleotide
caaattcaaggcccagatct

SEQ ID NO: 2535 - DNA, 20 bp, Artificial sequence
  Synthetic oligonucleotide
acaaattcaaggcccagatc

SEQ ID NO: 2536 - DNA, 20 bp, Artificial sequence
  Synthetic oligonucleotide
tacaaattcaaggcccagat

SEQ ID NO: 2537 - DNA, 20 bp, Artificial sequence
  Synthetic oligonucleotide
atacaaattcaaggcccaga

SEQ ID NO: 2538 - DNA, 20 bp, Artificial sequence
  Synthetic oligonucleotide
aatacaaattcaaggcccag

SEQ ID NO: 2539 - DNA, 20 bp, Artificial sequence
  Synthetic oligonucleotide
aaatacaaattcaaggccca

SEQ ID NO: 2540 - DNA, 20 bp, Artificial sequence
  Synthetic oligonucleotide
gaaatacaaattcaaggccc

SEQ ID NO: 2541 - DNA, 20 bp, Artificial sequence
  Synthetic oligonucleotide
ggaaatacaaattcaaggcc

SEQ ID NO: 2542 - DNA, 20 bp, Artificial sequence
  Synthetic oligonucleotide
tggaaatacaaattcaaggc

SEQ ID NO: 2543 - DNA, 20 bp, Artificial sequence
  Synthetic oligonucleotide
ctggaaatacaaattcaagg

SEQ ID NO: 2544 - DNA, 20 bp, Artificial sequence
  Synthetic oligonucleotide
tctggaaatacaaattcaag

SEQ ID NO: 2545 - DNA, 20 bp, Artificial sequence
  Synthetic oligonucleotide
gtctggaaatacaaattcaa

SEQ ID NO: 2546 - DNA, 20 bp, Artificial sequence
  Synthetic oligonucleotide
tgtctggaaatacaaattca

SEQ ID NO: 2547 - DNA, 20 bp, Artificial sequence
  Synthetic oligonucleotide
gtgtctggaaatacaaattc

SEQ ID NO: 2548 - DNA, 20 bp, Artificial sequence
  Synthetic oligonucleotide
agtgtctggaaatacaaatt

SEQ ID NO: 2549 - DNA, 20 bp, Artificial sequence
  Synthetic oligonucleotide
tagtgtctggaaatacaaat

SEQ ID NO: 2550 - DNA, 20 bp, Artificial sequence
  Synthetic oligonucleotide
ctagtgtctggaaatacaaa

SEQ ID NO: 2551 - DNA, 20 bp, Artificial sequence
  Synthetic oligonucleotide
actagtgtctggaaatacaa

SEQ ID NO: 2552 - DNA, 20 bp, Artificial sequence
  Synthetic oligonucleotide
cactagtgtctggaaataca

SEQ ID NO: 2553 - DNA, 20 bp, Artificial sequence
  Synthetic oligonucleotide
tcactagtgtctggaaatac

SEQ ID NO: 2554 - DNA, 20 bp, Artificial sequence
  Synthetic oligonucleotide
atcactagtgtctggaaata

SEQ ID NO: 2555 - DNA, 20 bp, Artificial sequence
  Synthetic oligonucleotide
aatcactagtgtctggaaat

SEQ ID NO: 2556 - DNA, 20 bp, Artificial sequence
  Synthetic oligonucleotide
gaatcactagtgtctggaaa

SEQ ID NO: 2557 - DNA, 20 bp, Artificial sequence
  Synthetic oligonucleotide
agaatcactagtgtctggaa

SEQ ID NO: 2558 - DNA, 20 bp, Artificial sequence
  Synthetic oligonucleotide
gagaatcactagtgtctgga

SEQ ID NO: 2559 - DNA, 20 bp, Artificial sequence
  Synthetic oligonucleotide
agagaatcactagtgtctgg

SEQ ID NO: 2560 - DNA, 20 bp, Artificial sequence
  Synthetic oligonucleotide
cagagaatcactagtgtctg

SEQ ID NO: 2561 - DNA, 20 bp, Artificial sequence
  Synthetic oligonucleotide
ccagagaatcactagtgtct

SEQ ID NO: 2562 - DNA, 20 bp, Artificial sequence
  Synthetic oligonucleotide
accagagaatcactagtgtc

SEQ ID NO: 2563 - DNA, 20 bp, Artificial sequence
  Synthetic oligonucleotide
gaccagagaatcactagtgt

SEQ ID NO: 2564 - DNA, 20 bp, Artificial sequence
  Synthetic oligonucleotide
ggaccagagaatcactagtg

SEQ ID NO: 2565 - DNA, 20 bp, Artificial sequence
  Synthetic oligonucleotide
aggaccagagaatcactagt

SEQ ID NO: 2566 - DNA, 20 bp, Artificial sequence
  Synthetic oligonucleotide
aaggaccagagaatcactag

SEQ ID NO: 2567 - DNA, 20 bp, Artificial sequence
  Synthetic oligonucleotide
caaggaccagagaatcacta

SEQ ID NO: 2568 - DNA, 20 bp, Artificial sequence
  Synthetic oligonucleotide
acaaggaccagagaatcact

SEQ ID NO: 2569 - DNA, 20 bp, Artificial sequence
  Synthetic oligonucleotide
cacaaggaccagagaatcac

SEQ ID NO: 2570 - DNA, 20 bp, Artificial sequence
  Synthetic oligonucleotide
ccacaaggaccagagaatca

SEQ ID NO: 2571 - DNA, 20 bp, Artificial sequence
  Synthetic oligonucleotide
cccacaaggaccagagaatc

SEQ ID NO: 2572 - DNA, 20 bp, Artificial sequence
  Synthetic oligonucleotide
acatagtggtacttttccca

SEQ ID NO: 2573 - DNA, 20 bp, Artificial sequence
  Synthetic oligonucleotide
aacatagtggtacttttccc

SEQ ID NO: 2574 - DNA, 20 bp, Artificial sequence
  Synthetic oligonucleotide
aaacatagtggtacttttcc

SEQ ID NO: 2575 - DNA, 20 bp, Artificial sequence
  Synthetic oligonucleotide
aaaacatagtggtacttttc

SEQ ID NO: 2576 - DNA, 20 bp, Artificial sequence
  Synthetic oligonucleotide
caaaacatagtggtactttt

SEQ ID NO: 2577 - DNA, 20 bp, Artificial sequence
  Synthetic oligonucleotide
acaaaacatagtggtacttt

SEQ ID NO: 2578 - DNA, 20 bp, Artificial sequence
  Synthetic oligonucleotide
cacaaaacatagtggtactt

SEQ ID NO: 2579 - DNA, 20 bp, Artificial sequence
  Synthetic oligonucleotide
tctttccacaaaacatagtg

SEQ ID NO: 2580 - DNA, 20 bp, Artificial sequence
  Synthetic oligonucleotide
ctctttccacaaaacatagt

SEQ ID NO: 2581 - DNA, 20 bp, Artificial sequence
  Synthetic oligonucleotide
tctctttccacaaaacatag

SEQ ID NO: 2582 - DNA, 20 bp, Artificial sequence
  Synthetic oligonucleotide
ttctctttccacaaaacata

SEQ ID NO: 2583 - DNA, 20 bp, Artificial sequence
  Synthetic oligonucleotide
cttctctttccacaaaacat

SEQ ID NO: 2584 - DNA, 20 bp, Artificial sequence
  Synthetic oligonucleotide
gcttctctttccacaaaaca

SEQ ID NO: 2585 - DNA, 20 bp, Artificial sequence
  Synthetic oligonucleotide
ggcttctctttccacaaaac

SEQ ID NO: 2586 - DNA, 20 bp, Artificial sequence
  Synthetic oligonucleotide
tggcttctctttccacaaaa

SEQ ID NO: 2587 - DNA, 20 bp, Artificial sequence
  Synthetic oligonucleotide
ttggcttctctttccacaaa

SEQ ID NO: 2588 - DNA, 20 bp, Artificial sequence
  Synthetic oligonucleotide
attggcttctctttccacaa

SEQ ID NO: 2589 - DNA, 20 bp, Artificial sequence
  Synthetic oligonucleotide
cattggcttctctttccaca

SEQ ID NO: 2590 - DNA, 20 bp, Artificial sequence
  Synthetic oligonucleotide
tcattggcttctctttccac

SEQ ID NO: 2591 - DNA, 20 bp, Artificial sequence
  Synthetic oligonucleotide
ttcattggcttctctttcca

SEQ ID NO: 2592 - DNA, 20 bp, Artificial sequence
  Synthetic oligonucleotide
gttcattggcttctctttcc

SEQ ID NO: 2593 - DNA, 20 bp, Artificial sequence
  Synthetic oligonucleotide
agttcattggcttctctttc

SEQ ID NO: 2594 - DNA, 20 bp, Artificial sequence
  Synthetic oligonucleotide
aagttcattggcttctcttt

SEQ ID NO: 2595 - DNA, 20 bp, Artificial sequence
  Synthetic oligonucleotide
gaagttcattggcttctctt

SEQ ID NO: 2596 - DNA, 20 bp, Artificial sequence
  Synthetic oligonucleotide
tctccgaagttcattggctt

SEQ ID NO: 2597 - DNA, 20 bp, Artificial sequence
  Synthetic oligonucleotide
ctctccgaagttcattggct

SEQ ID NO: 2598 - DNA, 20 bp, Artificial sequence
  Synthetic oligonucleotide
cctctccgaagttcattggc

SEQ ID NO: 2599 - DNA, 20 bp, Artificial sequence
  Synthetic oligonucleotide
tcctctccgaagttcattgg

SEQ ID NO: 2600 - DNA, 20 bp, Artificial sequence
  Synthetic oligonucleotide
ttcctctccgaagttcattg

SEQ ID NO: 2601 - DNA, 20 bp, Artificial sequence
  Synthetic oligonucleotide
cttcctctccgaagttcatt

SEQ ID NO: 2602 - DNA, 20 bp, Artificial sequence
  Synthetic oligonucleotide
agtagatcttcctctccgaa

SEQ ID NO: 2603 - DNA, 20 bp, Artificial sequence
  Synthetic oligonucleotide
cagtagatcttcctctccga

SEQ ID NO: 2604 - DNA, 20 bp, Artificial sequence
  Synthetic oligonucleotide
acagtagatcttcctctccg

SEQ ID NO: 2605 - DNA, 20 bp, Artificial sequence
  Synthetic oligonucleotide
cacagtagatcttcctctcc

SEQ ID NO: 2606 - DNA, 20 bp, Artificial sequence
  Synthetic oligonucleotide
tcacagtagatcttcctctc

SEQ ID NO: 2607 - DNA, 20 bp, Artificial sequence
  Synthetic oligonucleotide
gtcacagtagatcttcctct

SEQ ID NO: 2608 - DNA, 20 bp, Artificial sequence
  Synthetic oligonucleotide
ggtcacagtagatcttcctc

SEQ ID NO: 2609 - DNA, 20 bp, Artificial sequence
  Synthetic oligonucleotide
tggtcacagtagatcttcct

SEQ ID NO: 2610 - DNA, 20 bp, Artificial sequence
  Synthetic oligonucleotide
ttggtcacagtagatcttcc

SEQ ID NO: 2611 - DNA, 20 bp, Artificial sequence
  Synthetic oligonucleotide
cttggtcacagtagatcttc

SEQ ID NO: 2612 - DNA, 20 bp, Artificial sequence
  Synthetic oligonucleotide
tcttggtcacagtagatctt

SEQ ID NO: 2613 - DNA, 20 bp, Artificial sequence
  Synthetic oligonucleotide
ctcttggtcacagtagatct

SEQ ID NO: 2614 - DNA, 20 bp, Artificial sequence
  Synthetic oligonucleotide
actcttggtcacagtagatc

SEQ ID NO: 2615 - DNA, 20 bp, Artificial sequence
  Synthetic oligonucleotide
tactcttggtcacagtagat

SEQ ID NO: 2616 - DNA, 20 bp, Artificial sequence
  Synthetic oligonucleotide
atactcttggtcacagtaga

SEQ ID NO: 2617 - DNA, 20 bp, Artificial sequence
  Synthetic oligonucleotide
aatactcttggtcacagtag

SEQ ID NO: 2618 - DNA, 20 bp, Artificial sequence
  Synthetic oligonucleotide
caatactcttggtcacagta

SEQ ID NO: 2619 - DNA, 20 bp, Artificial sequence
  Synthetic oligonucleotide
acaatactcttggtcacagt

SEQ ID NO: 2620 - DNA, 20 bp, Artificial sequence
  Synthetic oligonucleotide
cacaatactcttggtcacag

SEQ ID NO: 2621 - DNA, 20 bp, Artificial sequence
  Synthetic oligonucleotide
ccacaatactcttggtcaca

SEQ ID NO: 2622 - DNA, 20 bp, Artificial sequence
  Synthetic oligonucleotide
tccacaatactcttggtcac

SEQ ID NO: 2623 - DNA, 20 bp, Artificial sequence
  Synthetic oligonucleotide
ctccacaatactcttggtca

SEQ ID NO: 2624 - DNA, 20 bp, Artificial sequence
  Synthetic oligonucleotide
cctccacaatactcttggtc

SEQ ID NO: 2625 - DNA, 20 bp, Artificial sequence
  Synthetic oligonucleotide
tcctccacaatactcttggt

SEQ ID NO: 2626 - DNA, 20 bp, Artificial sequence
  Synthetic oligonucleotide
ttcctccacaatactcttgg

SEQ ID NO: 2627 - DNA, 20 bp, Artificial sequence
  Synthetic oligonucleotide
attcctccacaatactcttg

SEQ ID NO: 2628 - DNA, 20 bp, Artificial sequence
  Synthetic oligonucleotide
aattcctccacaatactctt

SEQ ID NO: 2629 - DNA, 20 bp, Artificial sequence
  Synthetic oligonucleotide
aaattcctccacaatactct

SEQ ID NO: 2630 - DNA, 20 bp, Artificial sequence
  Synthetic oligonucleotide
taaattcctccacaatactc

SEQ ID NO: 2631 - DNA, 20 bp, Artificial sequence
  Synthetic oligonucleotide
ataaattcctccacaatact

SEQ ID NO: 2632 - DNA, 20 bp, Artificial sequence
  Synthetic oligonucleotide
gataaattcctccacaatac

SEQ ID NO: 2633 - DNA, 20 bp, Artificial sequence
  Synthetic oligonucleotide
agttgttctcggataaattc

SEQ ID NO: 2634 - DNA, 20 bp, Artificial sequence
  Synthetic oligonucleotide
cagttgttctcggataaatt

SEQ ID NO: 2635 - DNA, 20 bp, Artificial sequence
  Synthetic oligonucleotide
ccagttgttctcggataaat

SEQ ID NO: 2636 - DNA, 20 bp, Artificial sequence
  Synthetic oligonucleotide
tccagttgttctcggataaa

SEQ ID NO: 2637 - DNA, 20 bp, Artificial sequence
  Synthetic oligonucleotide
ctccagttgttctcggataa

SEQ ID NO: 2638 - DNA, 20 bp, Artificial sequence
  Synthetic oligonucleotide
gctccagttgttctcggata

SEQ ID NO: 2639 - DNA, 20 bp, Artificial sequence
  Synthetic oligonucleotide
agctccagttgttctcggat

SEQ ID NO: 2640 - DNA, 20 bp, Artificial sequence
  Synthetic oligonucleotide
tagctccagttgttctcgga

SEQ ID NO: 2641 - DNA, 20 bp, Artificial sequence
  Synthetic oligonucleotide
gtagctccagttgttctcgg

SEQ ID NO: 2642 - DNA, 20 bp, Artificial sequence
  Synthetic oligonucleotide
agtagctccagttgttctcg

SEQ ID NO: 2643 - DNA, 20 bp, Artificial sequence
  Synthetic oligonucleotide
gagtagctccagttgttctc

SEQ ID NO: 2644 - DNA, 20 bp, Artificial sequence
  Synthetic oligonucleotide
caatgtcccttggatgcctc

SEQ ID NO: 2645 - DNA, 20 bp, Artificial sequence
  Synthetic oligonucleotide
gcaatgtcccttggatgcct

SEQ ID NO: 2646 - DNA, 20 bp, Artificial sequence
  Synthetic oligonucleotide
tggcaatgtcccttggatgc

SEQ ID NO: 2647 - DNA, 20 bp, Artificial sequence
  Synthetic oligonucleotide
gtggcaatgtcccttggatg

SEQ ID NO: 2648 - DNA, 20 bp, Artificial sequence
  Synthetic oligonucleotide
agtggcaatgtcccttggat

SEQ ID NO: 2649 - DNA, 20 bp, Artificial sequence
  Synthetic oligonucleotide
cagtggcaatgtcccttgga

SEQ ID NO: 2650 - DNA, 20 bp, Artificial sequence
  Synthetic oligonucleotide
tcagtggcaatgtcccttgg

SEQ ID NO: 2651 - DNA, 20 bp, Artificial sequence
  Synthetic oligonucleotide
gtcagtggcaatgtcccttg

SEQ ID NO: 2652 - DNA, 20 bp, Artificial sequence
  Synthetic oligonucleotide
agtcagtggcaatgtccctt

SEQ ID NO: 2653 - DNA, 20 bp, Artificial sequence
  Synthetic oligonucleotide
cagtcagtggcaatgtccct

SEQ ID NO: 2654 - DNA, 20 bp, Artificial sequence
  Synthetic oligonucleotide
acagtcagtggcaatgtccc

SEQ ID NO: 2655 - DNA, 20 bp, Artificial sequence
  Synthetic oligonucleotide
gacagtcagtggcaatgtcc

SEQ ID NO: 2656 - DNA, 20 bp, Artificial sequence
  Synthetic oligonucleotide
ggacagtcagtggcaatgtc

SEQ ID NO: 2657 - DNA, 20 bp, Artificial sequence
  Synthetic oligonucleotide
tggacagtcagtggcaatgt

SEQ ID NO: 2658 - DNA, 20 bp, Artificial sequence
  Synthetic oligonucleotide
ctggacagtcagtggcaatg

SEQ ID NO: 2659 - DNA, 20 bp, Artificial sequence
  Synthetic oligonucleotide
tctggacagtcagtggcaat

SEQ ID NO: 2660 - DNA, 20 bp, Artificial sequence
  Synthetic oligonucleotide
ttctggacagtcagtggcaa

SEQ ID NO: 2661 - DNA, 20 bp, Artificial sequence
  Synthetic oligonucleotide
cttctggacagtcagtggca

SEQ ID NO: 2662 - DNA, 20 bp, Artificial sequence
  Synthetic oligonucleotide
accttctggacagtcagtgg

SEQ ID NO: 2663 - DNA, 20 bp, Artificial sequence
  Synthetic oligonucleotide
caccttctggacagtcagtg

SEQ ID NO: 2664 - DNA, 20 bp, Artificial sequence
  Synthetic oligonucleotide
acaccttctggacagtcagt

SEQ ID NO: 2665 - DNA, 20 bp, Artificial sequence
  Synthetic oligonucleotide
ccaacaccttctggacagtc

SEQ ID NO: 2666 - DNA, 20 bp, Artificial sequence
  Synthetic oligonucleotide
gccaacaccttctggacagt

SEQ ID NO: 2667 - DNA, 20 bp, Artificial sequence
  Synthetic oligonucleotide
tgccaacaccttctggacag

SEQ ID NO: 2668 - DNA, 20 bp, Artificial sequence
  Synthetic oligonucleotide
atgccaacaccttctggaca

SEQ ID NO: 2669 - DNA, 20 bp, Artificial sequence
  Synthetic oligonucleotide
gatgccaacaccttctggac

SEQ ID NO: 2670 - DNA, 20 bp, Artificial sequence
  Synthetic oligonucleotide
ggatgccaacaccttctgga

SEQ ID NO: 2671 - DNA, 20 bp, Artificial sequence
  Synthetic oligonucleotide
tgggatgccaacaccttctg

SEQ ID NO: 2672 - DNA, 20 bp, Artificial sequence
  Synthetic oligonucleotide
ttgggatgccaacaccttct

SEQ ID NO: 2673 - DNA, 20 bp, Artificial sequence
  Synthetic oligonucleotide
cttgggatgccaacaccttc

SEQ ID NO: 2674 - DNA, 20 bp, Artificial sequence
  Synthetic oligonucleotide
gcttgggatgccaacacctt

SEQ ID NO: 2675 - DNA, 20 bp, Artificial sequence
  Synthetic oligonucleotide
taaacttaatggccccatgg

SEQ ID NO: 2676 - DNA, 20 bp, Artificial sequence
  Synthetic oligonucleotide
ttaaacttaatggccccatg

SEQ ID NO: 2677 - DNA, 20 bp, Artificial sequence
  Synthetic oligonucleotide
aggccatcattaaacttaat

SEQ ID NO: 2678 - DNA, 20 bp, Artificial sequence
  Synthetic oligonucleotide
caggccatcattaaacttaa

SEQ ID NO: 2679 - DNA, 20 bp, Artificial sequence
  Synthetic oligonucleotide
tcaggccatcattaaactta

SEQ ID NO: 2680 - DNA, 20 bp, Artificial sequence
  Synthetic oligonucleotide
ctcaggccatcattaaactt

SEQ ID NO: 2681 - DNA, 20 bp, Artificial sequence
  Synthetic oligonucleotide
gctcaggccatcattaaact

SEQ ID NO: 2682 - DNA, 20 bp, Artificial sequence
  Synthetic oligonucleotide
caactttcctgtaagctcag

SEQ ID NO: 2683 - DNA, 20 bp, Artificial sequence
  Synthetic oligonucleotide
gcaactttcctgtaagctca

SEQ ID NO: 2684 - DNA, 20 bp, Artificial sequence
  Synthetic oligonucleotide
ggcaactttcctgtaagctc

SEQ ID NO: 2685 - DNA, 20 bp, Artificial sequence
  Synthetic oligonucleotide
cggcaactttcctgtaagct

SEQ ID NO: 2686 - DNA, 20 bp, Artificial sequence
  Synthetic oligonucleotide
gcggcaactttcctgtaagc

SEQ ID NO: 2687 - DNA, 20 bp, Artificial sequence
  Synthetic oligonucleotide
ggcggcaactttcctgtaag

SEQ ID NO: 2688 - DNA, 20 bp, Artificial sequence
  Synthetic oligonucleotide
aggcggcaactttcctgtaa

SEQ ID NO: 2689 - DNA, 20 bp, Artificial sequence
  Synthetic oligonucleotide
aaggcggcaactttcctgta

SEQ ID NO: 2690 - DNA, 20 bp, Artificial sequence
  Synthetic oligonucleotide
taaggcggcaactttcctgt

SEQ ID NO: 2691 - DNA, 20 bp, Artificial sequence
  Synthetic oligonucleotide
ataaggcggcaactttcctg

SEQ ID NO: 2692 - DNA, 20 bp, Artificial sequence
  Synthetic oligonucleotide
aataaggcggcaactttcct

SEQ ID NO: 2693 - DNA, 20 bp, Artificial sequence
  Synthetic oligonucleotide
caataaggcggcaactttcc

SEQ ID NO: 2694 - DNA, 20 bp, Artificial sequence
  Synthetic oligonucleotide
tcaataaggcggcaactttc

SEQ ID NO: 2695 - DNA, 20 bp, Artificial sequence
  Synthetic oligonucleotide
ttcaataaggcggcaacttt

SEQ ID NO: 2696 - DNA, 20 bp, Artificial sequence
  Synthetic oligonucleotide
cttcaataaggcggcaactt

SEQ ID NO: 2697 - DNA, 20 bp, Artificial sequence
  Synthetic oligonucleotide
gcttcaataaggcggcaact

SEQ ID NO: 2698 - DNA, 20 bp, Artificial sequence
  Synthetic oligonucleotide
agcttcaataaggcggcaac

SEQ ID NO: 2699 - DNA, 20 bp, Artificial sequence
  Synthetic oligonucleotide
gagcttcaataaggcggcaa

SEQ ID NO: 2700 - DNA, 20 bp, Artificial sequence
  Synthetic oligonucleotide
agagcttcaataaggcggca

SEQ ID NO: 2701 - DNA, 20 bp, Artificial sequence
  Synthetic oligonucleotide
cagagcttcaataaggcggc

SEQ ID NO: 2702 - DNA, 20 bp, Artificial sequence
  Synthetic oligonucleotide
acagagcttcaataaggcgg

SEQ ID NO: 2703 - DNA, 20 bp, Artificial sequence
  Synthetic oligonucleotide
gacagagcttcaataaggcg

SEQ ID NO: 2704 - DNA, 20 bp, Artificial sequence
  Synthetic oligonucleotide
ggacagagcttcaataaggc

SEQ ID NO: 2705 - DNA, 20 bp, Artificial sequence
  Synthetic oligonucleotide
aggacagagcttcaataagg

SEQ ID NO: 2706 - DNA, 20 bp, Artificial sequence
  Synthetic oligonucleotide
gaggacagagcttcaataag

SEQ ID NO: 2707 - DNA, 20 bp, Artificial sequence
  Synthetic oligonucleotide
tgaggacagagcttcaataa

SEQ ID NO: 2708 - DNA, 20 bp, Artificial sequence
  Synthetic oligonucleotide
atgaggacagagcttcaata

SEQ ID NO: 2709 - DNA, 20 bp, Artificial sequence
  Synthetic oligonucleotide
catgaggacagagcttcaat

SEQ ID NO: 2710 - DNA, 20 bp, Artificial sequence
  Synthetic oligonucleotide
gcatgaggacagagcttcaa

SEQ ID NO: 2711 - DNA, 20 bp, Artificial sequence
  Synthetic oligonucleotide
ggcatgaggacagagcttca

SEQ ID NO: 2712 - DNA, 20 bp, Artificial sequence
  Synthetic oligonucleotide
tggcatgaggacagagcttc

SEQ ID NO: 2713 - DNA, 20 bp, Artificial sequence
  Synthetic oligonucleotide
agcacactggaatggcagct

SEQ ID NO: 2714 - DNA, 20 bp, Artificial sequence
  Synthetic oligonucleotide
tgagcacactggaatggcag

SEQ ID NO: 2715 - DNA, 20 bp, Artificial sequence
  Synthetic oligonucleotide
gcatagaaggtctcccgtga

SEQ ID NO: 2716 - DNA, 20 bp, Artificial sequence
  Synthetic oligonucleotide
agcatagaaggtctcccgtg

SEQ ID NO: 2717 - DNA, 20 bp, Artificial sequence
  Synthetic oligonucleotide
cagcatagaaggtctcccgt

SEQ ID NO: 2718 - DNA, 20 bp, Artificial sequence
  Synthetic oligonucleotide
acggcagcatagaaggtctc

SEQ ID NO: 2719 - DNA, 20 bp, Artificial sequence
  Synthetic oligonucleotide
aacggcagcatagaaggtct

SEQ ID NO: 2720 - DNA, 20 bp, Artificial sequence
  Synthetic oligonucleotide
taacggcagcatagaaggtc

SEQ ID NO: 2721 - DNA, 20 bp, Artificial sequence
  Synthetic oligonucleotide
ctaacggcagcatagaaggt

SEQ ID NO: 2722 - DNA, 20 bp, Artificial sequence
  Synthetic oligonucleotide
tggtctatgtcagctaacgg

SEQ ID NO: 2723 - DNA, 20 bp, Artificial sequence
  Synthetic oligonucleotide
gtggtctatgtcagctaacg

SEQ ID NO: 2724 - DNA, 20 bp, Artificial sequence
  Synthetic oligonucleotide
agtggtctatgtcagctaac

SEQ ID NO: 2725 - DNA, 20 bp, Artificial sequence
  Synthetic oligonucleotide
aagtggtctatgtcagctaa

SEQ ID NO: 2726 - DNA, 20 bp, Artificial sequence
  Synthetic oligonucleotide
caagtggtctatgtcagcta

SEQ ID NO: 2727 - DNA, 20 bp, Artificial sequence
  Synthetic oligonucleotide
ccaagtggtctatgtcagct

SEQ ID NO: 2728 - DNA, 20 bp, Artificial sequence
  Synthetic oligonucleotide
tccaagtggtctatgtcagc

SEQ ID NO: 2729 - DNA, 20 bp, Artificial sequence
  Synthetic oligonucleotide
ttccaagtggtctatgtcag

SEQ ID NO: 2730 - DNA, 20 bp, Artificial sequence
  Synthetic oligonucleotide
gttccaagtggtctatgtca

SEQ ID NO: 2731 - DNA, 20 bp, Artificial sequence
  Synthetic oligonucleotide
tgttccaagtggtctatgtc

SEQ ID NO: 2732 - DNA, 20 bp, Artificial sequence
  Synthetic oligonucleotide
ctgttccaagtggtctatgt

SEQ ID NO: 2733 - DNA, 20 bp, Artificial sequence
  Synthetic oligonucleotide
cctgttccaagtggtctatg

SEQ ID NO: 2734 - DNA, 20 bp, Artificial sequence
  Synthetic oligonucleotide
tcctgttccaagtggtctat

SEQ ID NO: 2735 - DNA, 20 bp, Artificial sequence
  Synthetic oligonucleotide
ttcctgttccaagtggtcta

SEQ ID NO: 2736 - DNA, 20 bp, Artificial sequence
  Synthetic oligonucleotide
tttcctgttccaagtggtct

SEQ ID NO: 2737 - DNA, 20 bp, Artificial sequence
  Synthetic oligonucleotide
ttttcctgttccaagtggtc

SEQ ID NO: 2738 - DNA, 20 bp, Artificial sequence
  Synthetic oligonucleotide
tttttcctgttccaagtggt

SEQ ID NO: 2739 - DNA, 20 bp, Artificial sequence
  Synthetic oligonucleotide
gtttttcctgttccaagtgg

SEQ ID NO: 2740 - DNA, 20 bp, Artificial sequence
  Synthetic oligonucleotide
tgtttttcctgttccaagtg

SEQ ID NO: 2741 - DNA, 20 bp, Artificial sequence
  Synthetic oligonucleotide
ctgtttttcctgttccaagt

SEQ ID NO: 2742 - DNA, 20 bp, Artificial sequence
  Synthetic oligonucleotide
tctgtttttcctgttccaag

SEQ ID NO: 2743 - DNA, 20 bp, Artificial sequence
  Synthetic oligonucleotide
atctgtttttcctgttccaa

SEQ ID NO: 2744 - DNA, 20 bp, Artificial sequence
  Synthetic oligonucleotide
aatctgtttttcctgttcca

SEQ ID NO: 2745 - DNA, 20 bp, Artificial sequence
  Synthetic oligonucleotide
taatctgtttttcctgttcc

SEQ ID NO: 2746 - DNA, 20 bp, Artificial sequence
  Synthetic oligonucleotide
ttaatctgtttttcctgttc

SEQ ID NO: 2747 - DNA, 20 bp, Artificial sequence
  Synthetic oligonucleotide
tttaatctgtttttcctgtt

SEQ ID NO: 2748 - DNA, 20 bp, Artificial sequence
  Synthetic oligonucleotide
gtttaatctgtttttcctgt

SEQ ID NO: 2749 - DNA, 20 bp, Artificial sequence
  Synthetic oligonucleotide
ggtttaatctgtttttcctg

SEQ ID NO: 2750 - DNA, 20 bp, Artificial sequence
  Synthetic oligonucleotide
gggtttaatctgtttttcct

SEQ ID NO: 2751 - DNA, 20 bp, Artificial sequence
  Synthetic oligonucleotide
tgggtttaatctgtttttcc

SEQ ID NO: 2752 - DNA, 20 bp, Artificial sequence
  Synthetic oligonucleotide
ttgggtttaatctgtttttc

SEQ ID NO: 2753 - DNA, 20 bp, Artificial sequence
  Synthetic oligonucleotide
gttgggtttaatctgttttt

SEQ ID NO: 2754 - DNA, 20 bp, Artificial sequence
  Synthetic oligonucleotide
ggttgggtttaatctgtttt

SEQ ID NO: 2755 - DNA, 20 bp, Artificial sequence
  Synthetic oligonucleotide
aggttgggtttaatctgttt

SEQ ID NO: 2756 - DNA, 20 bp, Artificial sequence
  Synthetic oligonucleotide
gaggttgggtttaatctgtt

SEQ ID NO: 2757 - DNA, 20 bp, Artificial sequence
  Synthetic oligonucleotide
tgaggttgggtttaatctgt

SEQ ID NO: 2758 - DNA, 20 bp, Artificial sequence
  Synthetic oligonucleotide
gtgaggttgggtttaatctg

SEQ ID NO: 2759 - DNA, 20 bp, Artificial sequence
  Synthetic oligonucleotide
agtgaggttgggtttaatct

SEQ ID NO: 2760 - DNA, 20 bp, Artificial sequence
  Synthetic oligonucleotide
tagtgaggttgggtttaatc

SEQ ID NO: 2761 - DNA, 20 bp, Artificial sequence
  Synthetic oligonucleotide
ttagtgaggttgggtttaat

SEQ ID NO: 2762 - DNA, 20 bp, Artificial sequence
  Synthetic oligonucleotide
tttagtgaggttgggtttaa

SEQ ID NO: 2763 - DNA, 20 bp, Artificial sequence
  Synthetic oligonucleotide
gtttagtgaggttgggttta

SEQ ID NO: 2764 - DNA, 20 bp, Artificial sequence
  Synthetic oligonucleotide
agtttagtgaggttgggttt

SEQ ID NO: 2765 - DNA, 20 bp, Artificial sequence
  Synthetic oligonucleotide
aagtttagtgaggttgggtt

SEQ ID NO: 2766 - DNA, 20 bp, Artificial sequence
  Synthetic oligonucleotide
gaagtttagtgaggttgggt

SEQ ID NO: 2767 - DNA, 20 bp, Artificial sequence
  Synthetic oligonucleotide
cgaagtttagtgaggttggg

SEQ ID NO: 2768 - DNA, 20 bp, Artificial sequence
  Synthetic oligonucleotide
gcgaagtttagtgaggttgg

SEQ ID NO: 2769 - DNA, 20 bp, Artificial sequence
  Synthetic oligonucleotide
tgcgaagtttagtgaggttg

SEQ ID NO: 2770 - DNA, 20 bp, Artificial sequence
  Synthetic oligonucleotide
ttgcgaagtttagtgaggtt

SEQ ID NO: 2771 - DNA, 20 bp, Artificial sequence
  Synthetic oligonucleotide
tttgcgaagtttagtgaggt

SEQ ID NO: 2772 - DNA, 20 bp, Artificial sequence
  Synthetic oligonucleotide
ttttgcgaagtttagtgagg

SEQ ID NO: 2773 - DNA, 20 bp, Artificial sequence
  Synthetic oligonucleotide
attttgcgaagtttagtgag

SEQ ID NO: 2774 - DNA, 20 bp, Artificial sequence
  Synthetic oligonucleotide
cattttgcgaagtttagtga

SEQ ID NO: 2775 - DNA, 20 bp, Artificial sequence
  Synthetic oligonucleotide
ccattttgcgaagtttagtg

SEQ ID NO: 2776 - DNA, 20 bp, Artificial sequence
  Synthetic oligonucleotide
gccattttgcgaagtttagt

SEQ ID NO: 2777 - DNA, 20 bp, Artificial sequence
  Synthetic oligonucleotide
ggccattttgcgaagtttag

SEQ ID NO: 2778 - DNA, 20 bp, Artificial sequence
  Synthetic oligonucleotide
gggccattttgcgaagttta

SEQ ID NO: 2779 - DNA, 20 bp, Artificial sequence
  Synthetic oligonucleotide
tgggccattttgcgaagttt

SEQ ID NO: 2780 - DNA, 20 bp, Artificial sequence
  Synthetic oligonucleotide
ctgggccattttgcgaagtt

SEQ ID NO: 2781 - DNA, 20 bp, Artificial sequence
  Synthetic oligonucleotide
cctgggccattttgcgaagt

SEQ ID NO: 2782 - DNA, 20 bp, Artificial sequence
  Synthetic oligonucleotide
tttccaaagagacgccaggc

SEQ ID NO: 2783 - DNA, 20 bp, Artificial sequence
  Synthetic oligonucleotide
ttttccaaagagacgccagg

SEQ ID NO: 2784 - DNA, 20 bp, Artificial sequence
  Synthetic oligonucleotide
cttttccaaagagacgccag

SEQ ID NO: 2785 - DNA, 20 bp, Artificial sequence
  Synthetic oligonucleotide
gcttttccaaagagacgcca

SEQ ID NO: 2786 - DNA, 20 bp, Artificial sequence
  Synthetic oligonucleotide
tgcttttccaaagagacgcc

SEQ ID NO: 2787 - DNA, 20 bp, Artificial sequence
  Synthetic oligonucleotide
ctgcttttccaaagagacgc

SEQ ID NO: 2788 - DNA, 20 bp, Artificial sequence
  Synthetic oligonucleotide
tctgcttttccaaagagacg

SEQ ID NO: 2789 - DNA, 20 bp, Artificial sequence
  Synthetic oligonucleotide
ctctgcttttccaaagagac

SEQ ID NO: 2790 - DNA, 20 bp, Artificial sequence
  Synthetic oligonucleotide
actctgcttttccaaagaga

SEQ ID NO: 2791 - DNA, 20 bp, Artificial sequence
  Synthetic oligonucleotide
acactctgcttttccaaaga

SEQ ID NO: 2792 - DNA, 20 bp, Artificial sequence
  Synthetic oligonucleotide
cacactctgcttttccaaag

SEQ ID NO: 2793 - DNA, 20 bp, Artificial sequence
  Synthetic oligonucleotide
tcacactctgcttttccaaa

SEQ ID NO: 2794 - DNA, 20 bp, Artificial sequence
  Synthetic oligonucleotide
atcacactctgcttttccaa

SEQ ID NO: 2795 - DNA, 20 bp, Artificial sequence
  Synthetic oligonucleotide
tatcacactctgcttttcca

SEQ ID NO: 2796 - DNA, 20 bp, Artificial sequence
  Synthetic oligonucleotide
gtatcacactctgcttttcc

SEQ ID NO: 2797 - DNA, 20 bp, Artificial sequence
  Synthetic oligonucleotide
tgtatcacactctgcttttc

SEQ ID NO: 2798 - DNA, 20 bp, Artificial sequence
  Synthetic oligonucleotide
ttgtatcacactctgctttt

SEQ ID NO: 2799 - DNA, 20 bp, Artificial sequence
  Synthetic oligonucleotide
cttgtatcacactctgcttt

SEQ ID NO: 2800 - DNA, 20 bp, Artificial sequence
  Synthetic oligonucleotide
ccttgtatcacactctgctt

SEQ ID NO: 2801 - DNA, 20 bp, Artificial sequence
  Synthetic oligonucleotide
gccttgtatcacactctgct

SEQ ID NO: 2802 - DNA, 20 bp, Artificial sequence
  Synthetic oligonucleotide
tgccttgtatcacactctgc

SEQ ID NO: 2803 - DNA, 20 bp, Artificial sequence
  Synthetic oligonucleotide
ctgccttgtatcacactctg

SEQ ID NO: 2804 - DNA, 20 bp, Artificial sequence
  Synthetic oligonucleotide
tctgccttgtatcacactct

SEQ ID NO: 2805 - DNA, 20 bp, Artificial sequence
  Synthetic oligonucleotide
ctctgccttgtatcacactc

SEQ ID NO: 2806 - DNA, 20 bp, Artificial sequence
  Synthetic oligonucleotide
gctctgccttgtatcacact

SEQ ID NO: 2807 - DNA, 20 bp, Artificial sequence
  Synthetic oligonucleotide
tcacagggaggcatggattg

SEQ ID NO: 2808 - DNA, 20 bp, Artificial sequence
  Synthetic oligonucleotide
ttctcatggtggctcacagg

SEQ ID NO: 2809 - DNA, 20 bp, Artificial sequence
  Synthetic oligonucleotide
gttctcatggtggctcacag

SEQ ID NO: 2810 - DNA, 20 bp, Artificial sequence
  Synthetic oligonucleotide
tgttctcatggtggctcaca

SEQ ID NO: 2811 - DNA, 20 bp, Artificial sequence
  Synthetic oligonucleotide
ctgttctcatggtggctcac

SEQ ID NO: 2812 - DNA, 20 bp, Artificial sequence
  Synthetic oligonucleotide
tctgttctcatggtggctca

SEQ ID NO: 2813 - DNA, 20 bp, Artificial sequence
  Synthetic oligonucleotide
ttctgttctcatggtggctc

SEQ ID NO: 2814 - DNA, 20 bp, Artificial sequence
  Synthetic oligonucleotide
attctgttctcatggtggct

SEQ ID NO: 2815 - DNA, 20 bp, Artificial sequence
  Synthetic oligonucleotide
gattctgttctcatggtggc

SEQ ID NO: 2816 - DNA, 20 bp, Artificial sequence
  Synthetic oligonucleotide
tgattctgttctcatggtgg

SEQ ID NO: 2817 - DNA, 20 bp, Artificial sequence
  Synthetic oligonucleotide
gtgattctgttctcatggtg

SEQ ID NO: 2818 - DNA, 20 bp, Artificial sequence
  Synthetic oligonucleotide
agtgattctgttctcatggt

SEQ ID NO: 2819 - DNA, 20 bp, Artificial sequence
  Synthetic oligonucleotide
agaccagtgattctgttctc

SEQ ID NO: 2820 - DNA, 20 bp, Artificial sequence
  Synthetic oligonucleotide
ccttttagaccagtgattct

SEQ ID NO: 2821 - DNA, 20 bp, Artificial sequence
  Synthetic oligonucleotide
tccttttagaccagtgattc

SEQ ID NO: 2822 - DNA, 20 bp, Artificial sequence
  Synthetic oligonucleotide
ttccttttagaccagtgatt

SEQ ID NO: 2823 - DNA, 20 bp, Artificial sequence
  Synthetic oligonucleotide
gttccttttagaccagtgat

SEQ ID NO: 2824 - DNA, 20 bp, Artificial sequence
  Synthetic oligonucleotide
tgttccttttagaccagtga

SEQ ID NO: 2825 - DNA, 20 bp, Artificial sequence
  Synthetic oligonucleotide
ttgttccttttagaccagtg

SEQ ID NO: 2826 - DNA, 20 bp, Artificial sequence
  Synthetic oligonucleotide
tttgttccttttagaccagt

SEQ ID NO: 2827 - DNA, 20 bp, Artificial sequence
  Synthetic oligonucleotide
ctttgttccttttagaccag

SEQ ID NO: 2828 - DNA, 20 bp, Artificial sequence
  Synthetic oligonucleotide
cctttgttccttttagacca

SEQ ID NO: 2829 - DNA, 20 bp, Artificial sequence
  Synthetic oligonucleotide
ccctttgttccttttagacc

SEQ ID NO: 2830 - DNA, 20 bp, Artificial sequence
  Synthetic oligonucleotide
tccctttgttccttttagac

SEQ ID NO: 2831 - DNA, 20 bp, Artificial sequence
  Synthetic oligonucleotide
atccctttgttccttttaga

SEQ ID NO: 2832 - DNA, 20 bp, Artificial sequence
  Synthetic oligonucleotide
catccctttgttccttttag

SEQ ID NO: 2833 - DNA, 20 bp, Artificial sequence
  Synthetic oligonucleotide
acatccctttgttcctttta

SEQ ID NO: 2834 - DNA, 20 bp, Artificial sequence
  Synthetic oligonucleotide
aacatccctttgttcctttt

SEQ ID NO: 2835 - DNA, 20 bp, Artificial sequence
  Synthetic oligonucleotide
tacagtgaacatccctttgt

SEQ ID NO: 2836 - DNA, 20 bp, Artificial sequence
  Synthetic oligonucleotide
atacagtgaacatccctttg

SEQ ID NO: 2837 - DNA, 20 bp, Artificial sequence
  Synthetic oligonucleotide
catacagtgaacatcccttt

SEQ ID NO: 2838 - DNA, 20 bp, Artificial sequence
  Synthetic oligonucleotide
gcatacagtgaacatccctt

SEQ ID NO: 2839 - DNA, 20 bp, Artificial sequence
  Synthetic oligonucleotide
ggcatacagtgaacatccct

SEQ ID NO: 2840 - DNA, 20 bp, Artificial sequence
  Synthetic oligonucleotide
aggcatacagtgaacatccc

SEQ ID NO: 2841 - DNA, 20 bp, Artificial sequence
  Synthetic oligonucleotide
gaggcatacagtgaacatcc

SEQ ID NO: 2842 - DNA, 20 bp, Artificial sequence
  Synthetic oligonucleotide
agaggcatacagtgaacatc

SEQ ID NO: 2843 - DNA, 20 bp, Artificial sequence
  Synthetic oligonucleotide
cagaggcatacagtgaacat

SEQ ID NO: 2844 - DNA, 20 bp, Artificial sequence
  Synthetic oligonucleotide
tcagaggcatacagtgaaca

SEQ ID NO: 2845 - DNA, 20 bp, Artificial sequence
  Synthetic oligonucleotide
ctcagaggcatacagtgaac

SEQ ID NO: 2846 - DNA, 20 bp, Artificial sequence
  Synthetic oligonucleotide
gctcagaggcatacagtgaa

SEQ ID NO: 2847 - DNA, 20 bp, Artificial sequence
  Synthetic oligonucleotide
tgctcagaggcatacagtga

SEQ ID NO: 2848 - DNA, 20 bp, Artificial sequence
  Synthetic oligonucleotide
agggacactgggctgattca

SEQ ID NO: 2849 - DNA, 20 bp, Artificial sequence
  Synthetic oligonucleotide
ctaagctgctcagggacact

SEQ ID NO: 2850 - DNA, 20 bp, Artificial sequence
  Synthetic oligonucleotide
tctaagctgctcagggacac

SEQ ID NO: 2851 - DNA, 20 bp, Artificial sequence
  Synthetic oligonucleotide
gtctaagctgctcagggaca

SEQ ID NO: 2852 - DNA, 20 bp, Artificial sequence
  Synthetic oligonucleotide
tgtctaagctgctcagggac

SEQ ID NO: 2853 - DNA, 20 bp, Artificial sequence
  Synthetic oligonucleotide
ctgtctaagctgctcaggga

SEQ ID NO: 2854 - DNA, 20 bp, Artificial sequence
  Synthetic oligonucleotide
tgatacagagagccctgctg

SEQ ID NO: 2855 - DNA, 20 bp, Artificial sequence
  Synthetic oligonucleotide
ctgatacagagagccctgct

SEQ ID NO: 2856 - DNA, 20 bp, Artificial sequence
  Synthetic oligonucleotide
actgatacagagagccctgc

SEQ ID NO: 2857 - DNA, 20 bp, Artificial sequence
  Synthetic oligonucleotide
agactgatacagagagccct

SEQ ID NO: 2858 - DNA, 20 bp, Artificial sequence
  Synthetic oligonucleotide
aagactgatacagagagccc

SEQ ID NO: 2859 - DNA, 20 bp, Artificial sequence
  Synthetic oligonucleotide
aaagactgatacagagagcc

SEQ ID NO: 2860 - DNA, 20 bp, Artificial sequence
  Synthetic oligonucleotide
gaaagactgatacagagagc

SEQ ID NO: 2861 - DNA, 20 bp, Artificial sequence
  Synthetic oligonucleotide
agaaagactgatacagagag

SEQ ID NO: 2862 - DNA, 20 bp, Artificial sequence
  Synthetic oligonucleotide
aagaaagactgatacagaga

SEQ ID NO: 2863 - DNA, 20 bp, Artificial sequence
  Synthetic oligonucleotide
caagaaagactgatacagag

SEQ ID NO: 2864 - DNA, 20 bp, Artificial sequence
  Synthetic oligonucleotide
tcaagaaagactgatacaga

SEQ ID NO: 2865 - DNA, 20 bp, Artificial sequence
  Synthetic oligonucleotide
gctcaagaaagactgataca

SEQ ID NO: 2866 - DNA, 20 bp, Artificial sequence
  Synthetic oligonucleotide
tgctcaagaaagactgatac

SEQ ID NO: 2867 - DNA, 20 bp, Artificial sequence
  Synthetic oligonucleotide
ctgctcaagaaagactgata

SEQ ID NO: 2868 - DNA, 20 bp, Artificial sequence
  Synthetic oligonucleotide
tctgctcaagaaagactgat

SEQ ID NO: 2869 - DNA, 20 bp, Artificial sequence
  Synthetic oligonucleotide
atctgctcaagaaagactga

SEQ ID NO: 2870 - DNA, 20 bp, Artificial sequence
  Synthetic oligonucleotide
catctgctcaagaaagactg

SEQ ID NO: 2871 - DNA, 20 bp, Artificial sequence
  Synthetic oligonucleotide
tcatctgctcaagaaagact

SEQ ID NO: 2872 - DNA, 20 bp, Artificial sequence
  Synthetic oligonucleotide
atcatctgctcaagaaagac

SEQ ID NO: 2873 - DNA, 20 bp, Artificial sequence
  Synthetic oligonucleotide
aatcatctgctcaagaaaga

SEQ ID NO: 2874 - DNA, 20 bp, Artificial sequence
  Synthetic oligonucleotide
gaatcatctgctcaagaaag

SEQ ID NO: 2875 - DNA, 20 bp, Artificial sequence
  Synthetic oligonucleotide
ggaatcatctgctcaagaaa

SEQ ID NO: 2876 - DNA, 20 bp, Artificial sequence
  Synthetic oligonucleotide
gggaatcatctgctcaagaa

SEQ ID NO: 2877 - DNA, 20 bp, Artificial sequence
  Synthetic oligonucleotide
atctggctactcaactaggg

SEQ ID NO: 2878 - DNA, 20 bp, Artificial sequence
  Synthetic oligonucleotide
catctggctactcaactagg

SEQ ID NO: 2879 - DNA, 20 bp, Artificial sequence
  Synthetic oligonucleotide
tcatctggctactcaactag

SEQ ID NO: 2880 - DNA, 20 bp, Artificial sequence
  Synthetic oligonucleotide
ttcatctggctactcaacta

SEQ ID NO: 2881 - DNA, 20 bp, Artificial sequence
  Synthetic oligonucleotide
tttcatctggctactcaact

SEQ ID NO: 2882 - DNA, 20 bp, Artificial sequence
  Synthetic oligonucleotide
atttcatctggctactcaac

SEQ ID NO: 2883 - DNA, 20 bp, Artificial sequence
  Synthetic oligonucleotide
aatttcatctggctactcaa

SEQ ID NO: 2884 - DNA, 20 bp, Artificial sequence
  Synthetic oligonucleotide
gaatttcatctggctactca

SEQ ID NO: 2885 - DNA, 20 bp, Artificial sequence
  Synthetic oligonucleotide
tgaatttcatctggctactc

SEQ ID NO: 2886 - DNA, 20 bp, Artificial sequence
  Synthetic oligonucleotide
ttgaatttcatctggctact

SEQ ID NO: 2887 - DNA, 20 bp, Artificial sequence
  Synthetic oligonucleotide
cttgaatttcatctggctac

SEQ ID NO: 2888 - DNA, 20 bp, Artificial sequence
  Synthetic oligonucleotide
gcttgaatttcatctggcta

SEQ ID NO: 2889 - DNA, 20 bp, Artificial sequence
  Synthetic oligonucleotide
ggcttgaatttcatctggct

SEQ ID NO: 2890 - DNA, 20 bp, Artificial sequence
  Synthetic oligonucleotide
aggcttgaatttcatctggc

SEQ ID NO: 2891 - DNA, 20 bp, Artificial sequence
  Synthetic oligonucleotide
taggcttgaatttcatctgg

SEQ ID NO: 2892 - DNA, 20 bp, Artificial sequence
  Synthetic oligonucleotide
ttaggcttgaatttcatctg

SEQ ID NO: 2893 - DNA, 20 bp, Artificial sequence
  Synthetic oligonucleotide
tttaggcttgaatttcatct

SEQ ID NO: 2894 - DNA, 20 bp, Artificial sequence
  Synthetic oligonucleotide
ctttaggcttgaatttcatc

SEQ ID NO: 2895 - DNA, 20 bp, Artificial sequence
  Synthetic oligonucleotide
tctttaggcttgaatttcat

SEQ ID NO: 2896 - DNA, 20 bp, Artificial sequence
  Synthetic oligonucleotide
gtctttaggcttgaatttca

SEQ ID NO: 2897 - DNA, 20 bp, Artificial sequence
  Synthetic oligonucleotide
tgtctttaggcttgaatttc

SEQ ID NO: 2898 - DNA, 20 bp, Artificial sequence
  Synthetic oligonucleotide
ttgtctttaggcttgaattt

SEQ ID NO: 2899 - DNA, 20 bp, Artificial sequence
  Synthetic oligonucleotide
attgtctttaggcttgaatt

SEQ ID NO: 2900 - DNA, 20 bp, Artificial sequence
  Synthetic oligonucleotide
aattgtctttaggcttgaat

SEQ ID NO: 2901 - DNA, 20 bp, Artificial sequence
  Synthetic oligonucleotide
gaattgtctttaggcttgaa

SEQ ID NO: 2902 - DNA, 20 bp, Artificial sequence
  Synthetic oligonucleotide
tgaattgtctttaggcttga

SEQ ID NO: 2903 - DNA, 20 bp, Artificial sequence
  Synthetic oligonucleotide
atgaattgtctttaggcttg

SEQ ID NO: 2904 - DNA, 20 bp, Artificial sequence
  Synthetic oligonucleotide
aatgaattgtctttaggctt

SEQ ID NO: 2905 - DNA, 20 bp, Artificial sequence
  Synthetic oligonucleotide
gaatgaattgtctttaggct

SEQ ID NO: 2906 - DNA, 20 bp, Artificial sequence
  Synthetic oligonucleotide
tgaatgaattgtctttaggc

SEQ ID NO: 2907 - DNA, 20 bp, Artificial sequence
  Synthetic oligonucleotide
atgaatgaattgtctttagg

SEQ ID NO: 2908 - DNA, 20 bp, Artificial sequence
  Synthetic oligonucleotide
aatgaatgaattgtctttag

SEQ ID NO: 2909 - DNA, 20 bp, Artificial sequence
  Synthetic oligonucleotide
caaatgaatgaattgtcttt

SEQ ID NO: 2910 - DNA, 20 bp, Artificial sequence
  Synthetic oligonucleotide
gcaaatgaatgaattgtctt

SEQ ID NO: 2911 - DNA, 20 bp, Artificial sequence
  Synthetic oligonucleotide
tgcaaatgaatgaattgtct

SEQ ID NO: 2912 - DNA, 20 bp, Artificial sequence
  Synthetic oligonucleotide
atgcaaatgaatgaattgtc

SEQ ID NO: 2913 - DNA, 20 bp, Artificial sequence
  Synthetic oligonucleotide
gatgcaaatgaatgaattgt

SEQ ID NO: 2914 - DNA, 20 bp, Artificial sequence
  Synthetic oligonucleotide
ggatgcaaatgaatgaattg

SEQ ID NO: 2915 - DNA, 20 bp, Artificial sequence
  Synthetic oligonucleotide
tggatgcaaatgaatgaatt

SEQ ID NO: 2916 - DNA, 20 bp, Artificial sequence
  Synthetic oligonucleotide
atggatgcaaatgaatgaat

SEQ ID NO: 2917 - DNA, 20 bp, Artificial sequence
  Synthetic oligonucleotide
catggatgcaaatgaatgaa

SEQ ID NO: 2918 - DNA, 20 bp, Artificial sequence
  Synthetic oligonucleotide
ccatggatgcaaatgaatga

SEQ ID NO: 2919 - DNA, 20 bp, Artificial sequence
  Synthetic oligonucleotide
cccatggatgcaaatgaatg

SEQ ID NO: 2920 - DNA, 20 bp, Artificial sequence
  Synthetic oligonucleotide
gcccatggatgcaaatgaat

SEQ ID NO: 2921 - DNA, 20 bp, Artificial sequence
  Synthetic oligonucleotide
tgcccatggatgcaaatgaa

SEQ ID NO: 2922 - DNA, 20 bp, Artificial sequence
  Synthetic oligonucleotide
cttctgtgcccatggatgca

SEQ ID NO: 2923 - DNA, 20 bp, Artificial sequence
  Synthetic oligonucleotide
accttctgtgcccatggatg

SEQ ID NO: 2924 - DNA, 20 bp, Artificial sequence
  Synthetic oligonucleotide
aaccttctgtgcccatggat

SEQ ID NO: 2925 - DNA, 20 bp, Artificial sequence
  Synthetic oligonucleotide
caaccttctgtgcccatgga

SEQ ID NO: 2926 - DNA, 20 bp, Artificial sequence
  Synthetic oligonucleotide
agcaaccttctgtgcccatg

SEQ ID NO: 2927 - DNA, 20 bp, Artificial sequence
  Synthetic oligonucleotide
tagcaaccttctgtgcccat

SEQ ID NO: 2928 - DNA, 20 bp, Artificial sequence
  Synthetic oligonucleotide
atagcaaccttctgtgccca

SEQ ID NO: 2929 - DNA, 20 bp, Artificial sequence
  Synthetic oligonucleotide
tatagcaaccttctgtgccc

SEQ ID NO: 2930 - DNA, 20 bp, Artificial sequence
  Synthetic oligonucleotide
atatagcaaccttctgtgcc

SEQ ID NO: 2931 - DNA, 20 bp, Artificial sequence
  Synthetic oligonucleotide
tatatagcaaccttctgtgc

SEQ ID NO: 2932 - DNA, 20 bp, Artificial sequence
  Synthetic oligonucleotide
ctatatagcaaccttctgtg

SEQ ID NO: 2933 - DNA, 20 bp, Artificial sequence
  Synthetic oligonucleotide
actatatagcaaccttctgt

SEQ ID NO: 2934 - DNA, 20 bp, Artificial sequence
  Synthetic oligonucleotide
tactatatagcaaccttctg

SEQ ID NO: 2935 - DNA, 20 bp, Artificial sequence
  Synthetic oligonucleotide
atactatatagcaaccttct

SEQ ID NO: 2936 - DNA, 20 bp, Artificial sequence
  Synthetic oligonucleotide
gatactatatagcaaccttc

SEQ ID NO: 2937 - DNA, 20 bp, Artificial sequence
  Synthetic oligonucleotide
agatactatatagcaacctt

SEQ ID NO: 2938 - DNA, 20 bp, Artificial sequence
  Synthetic oligonucleotide
tagatactatatagcaacct

SEQ ID NO: 2939 - DNA, 20 bp, Artificial sequence
  Synthetic oligonucleotide
gtagatactatatagcaacc

SEQ ID NO: 2940 - DNA, 20 bp, Artificial sequence
  Synthetic oligonucleotide
ggtagatactatatagcaac

SEQ ID NO: 2941 - DNA, 20 bp, Artificial sequence
  Synthetic oligonucleotide
aggtagatactatatagcaa

SEQ ID NO: 2942 - DNA, 20 bp, Artificial sequence
  Synthetic oligonucleotide
aaggtagatactatatagca

SEQ ID NO: 2943 - DNA, 20 bp, Artificial sequence
  Synthetic oligonucleotide
aaaggtagatactatatagc

SEQ ID NO: 2944 - DNA, 20 bp, Artificial sequence
  Synthetic oligonucleotide
aaaaggtagatactatatag

SEQ ID NO: 2945 - DNA, 20 bp, Artificial sequence
  Synthetic oligonucleotide
caaaaggtagatactatata

SEQ ID NO: 2946 - DNA, 20 bp, Artificial sequence
  Synthetic oligonucleotide
gcaaaaggtagatactatat

SEQ ID NO: 2947 - DNA, 20 bp, Artificial sequence
  Synthetic oligonucleotide
agcaaaaggtagatactata

SEQ ID NO: 2948 - DNA, 20 bp, Artificial sequence
  Synthetic oligonucleotide
tagcaaaaggtagatactat

SEQ ID NO: 2949 - DNA, 20 bp, Artificial sequence
  Synthetic oligonucleotide
gtagcaaaaggtagatacta

SEQ ID NO: 2950 - DNA, 20 bp, Artificial sequence
  Synthetic oligonucleotide
agtagcaaaaggtagatact

SEQ ID NO: 2951 - DNA, 20 bp, Artificial sequence
  Synthetic oligonucleotide
aagtagcaaaaggtagatac

SEQ ID NO: 2952 - DNA, 20 bp, Artificial sequence
  Synthetic oligonucleotide
taagtagcaaaaggtagata

SEQ ID NO: 2953 - DNA, 20 bp, Artificial sequence
  Synthetic oligonucleotide
ataagtagcaaaaggtagat

SEQ ID NO: 2954 - DNA, 20 bp, Artificial sequence
  Synthetic oligonucleotide
aataagtagcaaaaggtaga

SEQ ID NO: 2955 - DNA, 20 bp, Artificial sequence
  Synthetic oligonucleotide
aaataagtagcaaaaggtag

SEQ ID NO: 2956 - DNA, 20 bp, Artificial sequence
  Synthetic oligonucleotide
taaataagtagcaaaaggta

SEQ ID NO: 2957 - DNA, 20 bp, Artificial sequence
  Synthetic oligonucleotide
ttaaataagtagcaaaaggt

SEQ ID NO: 2958 - DNA, 20 bp, Artificial sequence
  Synthetic oligonucleotide
attaaataagtagcaaaagg

SEQ ID NO: 2959 - DNA, 20 bp, Artificial sequence
  Synthetic oligonucleotide
cattaaataagtagcaaaag

SEQ ID NO: 2960 - DNA, 20 bp, Artificial sequence
  Synthetic oligonucleotide
caatcaaactgtcattaaat

SEQ ID NO: 2961 - DNA, 20 bp, Artificial sequence
  Synthetic oligonucleotide
ccaatcaaactgtcattaaa

SEQ ID NO: 2962 - DNA, 20 bp, Artificial sequence
  Synthetic oligonucleotide
accaatcaaactgtcattaa

SEQ ID NO: 2963 - DNA, 20 bp, Artificial sequence
  Synthetic oligonucleotide
aaccaatcaaactgtcatta

SEQ ID NO: 2964 - DNA, 20 bp, Artificial sequence
  Synthetic oligonucleotide
caaccaatcaaactgtcatt

SEQ ID NO: 2965 - DNA, 20 bp, Artificial sequence
  Synthetic oligonucleotide
gcaaccaatcaaactgtcat

SEQ ID NO: 2966 - DNA, 20 bp, Artificial sequence
  Synthetic oligonucleotide
agcaaccaatcaaactgtca

SEQ ID NO: 2967 - DNA, 20 bp, Artificial sequence
  Synthetic oligonucleotide
aagcaaccaatcaaactgtc

SEQ ID NO: 2968 - DNA, 20 bp, Artificial sequence
  Synthetic oligonucleotide
caagcaaccaatcaaactgt

SEQ ID NO: 2969 - DNA, 20 bp, Artificial sequence
  Synthetic oligonucleotide
ccaagcaaccaatcaaactg

SEQ ID NO: 2970 - DNA, 20 bp, Artificial sequence
  Synthetic oligonucleotide
accaagcaaccaatcaaact

SEQ ID NO: 2971 - DNA, 20 bp, Artificial sequence
  Synthetic oligonucleotide
aaccaagcaaccaatcaaac

SEQ ID NO: 2972 - DNA, 20 bp, Artificial sequence
  Synthetic oligonucleotide
aaaccaagcaaccaatcaaa

SEQ ID NO: 2973 - DNA, 20 bp, Artificial sequence
  Synthetic oligonucleotide
caaaccaagcaaccaatcaa

SEQ ID NO: 2974 - DNA, 20 bp, Artificial sequence
  Synthetic oligonucleotide
acaaaccaagcaaccaatca

SEQ ID NO: 2975 - DNA, 20 bp, Artificial sequence
  Synthetic oligonucleotide
aacaaaccaagcaaccaatc

SEQ ID NO: 2976 - DNA, 20 bp, Artificial sequence
  Synthetic oligonucleotide
taacaaaccaagcaaccaat

SEQ ID NO: 2977 - DNA, 20 bp, Artificial sequence
  Synthetic oligonucleotide
ataacaaaccaagcaaccaa

SEQ ID NO: 2978 - DNA, 20 bp, Artificial sequence
  Synthetic oligonucleotide
aataacaaaccaagcaacca

SEQ ID NO: 2979 - DNA, 20 bp, Artificial sequence
  Synthetic oligonucleotide
aaataacaaaccaagcaacc

SEQ ID NO: 2980 - DNA, 20 bp, Artificial sequence
  Synthetic oligonucleotide
caaataacaaaccaagcaac

SEQ ID NO: 2981 - DNA, 20 bp, Artificial sequence
  Synthetic oligonucleotide
tcaaataacaaaccaagcaa

SEQ ID NO: 2982 - DNA, 20 bp, Artificial sequence
  Synthetic oligonucleotide
ttcaaataacaaaccaagca

SEQ ID NO: 2983 - DNA, 20 bp, Artificial sequence
  Synthetic oligonucleotide
cttcaaataacaaaccaagc

SEQ ID NO: 2984 - DNA, 20 bp, Artificial sequence
  Synthetic oligonucleotide
ccttcaaataacaaaccaag

SEQ ID NO: 2985 - DNA, 20 bp, Artificial sequence
  Synthetic oligonucleotide
cccttcaaataacaaaccaa

SEQ ID NO: 2986 - DNA, 20 bp, Artificial sequence
  Synthetic oligonucleotide
acccttcaaataacaaacca

SEQ ID NO: 2987 - DNA, 20 bp, Artificial sequence
  Synthetic oligonucleotide
cacccttcaaataacaaacc

SEQ ID NO: 2988 - DNA, 20 bp, Artificial sequence
  Synthetic oligonucleotide
acacccttcaaataacaaac

SEQ ID NO: 2989 - DNA, 20 bp, Artificial sequence
  Synthetic oligonucleotide
cacacccttcaaataacaaa

SEQ ID NO: 2990 - DNA, 20 bp, Artificial sequence
  Synthetic oligonucleotide
tcacacccttcaaataacaa

SEQ ID NO: 2991 - DNA, 20 bp, Artificial sequence
  Synthetic oligonucleotide
atcacacccttcaaataaca

SEQ ID NO: 2992 - DNA, 20 bp, Artificial sequence
  Synthetic oligonucleotide
aatcacacccttcaaataac

SEQ ID NO: 2993 - DNA, 20 bp, Artificial sequence
  Synthetic oligonucleotide
aaatcacacccttcaaataa

SEQ ID NO: 2994 - DNA, 20 bp, Artificial sequence
  Synthetic oligonucleotide
aaaatcacacccttcaaata

SEQ ID NO: 2995 - DNA, 20 bp, Artificial sequence
  Synthetic oligonucleotide
aaaaatcacacccttcaaat

SEQ ID NO: 2996 - DNA, 20 bp, Artificial sequence
  Synthetic oligonucleotide
caaaaatcacacccttcaaa

SEQ ID NO: 2997 - DNA, 20 bp, Artificial sequence
  Synthetic oligonucleotide
acaaaaatcacacccttcaa

SEQ ID NO: 2998 - DNA, 20 bp, Artificial sequence
  Synthetic oligonucleotide
aacaaaaatcacacccttca

SEQ ID NO: 2999 - DNA, 20 bp, Artificial sequence
  Synthetic oligonucleotide
aaacaaaaatcacacccttc

SEQ ID NO: 3000 - DNA, 20 bp, Artificial sequence
  Synthetic oligonucleotide
aaaacaaaaatcacaccctt

SEQ ID NO: 3001 - DNA, 20 bp, Artificial sequence
  Synthetic oligonucleotide
aaaaacaaaaatcacaccct

SEQ ID NO: 3002 - DNA, 20 bp, Artificial sequence
  Synthetic oligonucleotide
caaaaacaaaaatcacaccc

SEQ ID NO: 3003 - DNA, 20 bp, Artificial sequence
  Synthetic oligonucleotide
acaaaaacaaaaatcacacc

SEQ ID NO: 3004 - DNA, 20 bp, Artificial sequence
  Synthetic oligonucleotide
tacaaaaacaaaaatcacac

SEQ ID NO: 3005 - DNA, 20 bp, Artificial sequence
  Synthetic oligonucleotide
gtacaaaaacaaaaatcaca

SEQ ID NO: 3006 - DNA, 20 bp, Artificial sequence
  Synthetic oligonucleotide
tgtacaaaaacaaaaatcac

SEQ ID NO: 3007 - DNA, 20 bp, Artificial sequence
  Synthetic oligonucleotide
ctgtacaaaaacaaaaatca

SEQ ID NO: 3008 - DNA, 20 bp, Artificial sequence
  Synthetic oligonucleotide
actgtacaaaaacaaaaatc

SEQ ID NO: 3009 - DNA, 20 bp, Artificial sequence
  Synthetic oligonucleotide
caaatgtgaagcttgaaaaa

SEQ ID NO: 3010 - DNA, 20 bp, Artificial sequence
  Synthetic oligonucleotide
gcaaatgtgaagcttgaaaa

SEQ ID NO: 3011 - DNA, 20 bp, Artificial sequence
  Synthetic oligonucleotide
cgcaaatgtgaagcttgaaa

SEQ ID NO: 3012 - DNA, 20 bp, Artificial sequence
  Synthetic oligonucleotide
acgcaaatgtgaagcttgaa

SEQ ID NO: 3013 - DNA, 20 bp, Artificial sequence
  Synthetic oligonucleotide
aattagatacacgcaaatgt

SEQ ID NO: 3014 - DNA, 20 bp, Artificial sequence
  Synthetic oligonucleotide
gaattagatacacgcaaatg

SEQ ID NO: 3015 - DNA, 20 bp, Artificial sequence
  Synthetic oligonucleotide
tgaattagatacacgcaaat

SEQ ID NO: 3016 - DNA, 20 bp, Artificial sequence
  Synthetic oligonucleotide
ctgaattagatacacgcaaa

SEQ ID NO: 3017 - DNA, 20 bp, Artificial sequence
  Synthetic oligonucleotide
gctgaattagatacacgcaa

SEQ ID NO: 3018 - DNA, 20 bp, Artificial sequence
  Synthetic oligonucleotide
agctgaattagatacacgca

SEQ ID NO: 3019 - DNA, 20 bp, Artificial sequence
  Synthetic oligonucleotide
cagctgaattagatacacgc

SEQ ID NO: 3020 - DNA, 20 bp, Artificial sequence
  Synthetic oligonucleotide
tcagctgaattagatacacg

SEQ ID NO: 3021 - DNA, 20 bp, Artificial sequence
  Synthetic oligonucleotide
atcagctgaattagatacac

SEQ ID NO: 3022 - DNA, 20 bp, Artificial sequence
  Synthetic oligonucleotide
catcagctgaattagataca

SEQ ID NO: 3023 - DNA, 20 bp, Artificial sequence
  Synthetic oligonucleotide
accccttggacttgagcatc

SEQ ID NO: 3024 - DNA, 20 bp, Artificial sequence
  Synthetic oligonucleotide
taccccttggacttgagcat

SEQ ID NO: 3025 - DNA, 20 bp, Artificial sequence
  Synthetic oligonucleotide
ctaccccttggacttgagca

SEQ ID NO: 3026 - DNA, 20 bp, Artificial sequence
  Synthetic oligonucleotide
actaccccttggacttgagc

SEQ ID NO: 3027 - DNA, 20 bp, Artificial sequence
  Synthetic oligonucleotide
gactaccccttggacttgag

SEQ ID NO: 3028 - DNA, 20 bp, Artificial sequence
  Synthetic oligonucleotide
agactaccccttggacttga

SEQ ID NO: 3029 - DNA, 20 bp, Artificial sequence
  Synthetic oligonucleotide
cagactaccccttggacttg

SEQ ID NO: 3030 - DNA, 20 bp, Artificial sequence
  Synthetic oligonucleotide
gcagactaccccttggactt

SEQ ID NO: 3031 - DNA, 20 bp, Artificial sequence
  Synthetic oligonucleotide
aaggcagactaccccttgga

SEQ ID NO: 3032 - DNA, 20 bp, Artificial sequence
  Synthetic oligonucleotide
agactgaagggaaaagaggg

SEQ ID NO: 3033 - DNA, 20 bp, Artificial sequence
  Synthetic oligonucleotide
aagactgaagggaaaagagg

SEQ ID NO: 3034 - DNA, 20 bp, Artificial sequence
  Synthetic oligonucleotide
gaagactgaagggaaaagag

SEQ ID NO: 3035 - DNA, 20 bp, Artificial sequence
  Synthetic oligonucleotide
agaagactgaagggaaaaga

SEQ ID NO: 3036 - DNA, 20 bp, Artificial sequence
  Synthetic oligonucleotide
aagaagactgaagggaaaag

SEQ ID NO: 3037 - DNA, 20 bp, Artificial sequence
  Synthetic oligonucleotide
gaagaagactgaagggaaaa

SEQ ID NO: 3038 - DNA, 20 bp, Artificial sequence
  Synthetic oligonucleotide
tgaagaagactgaagggaaa

SEQ ID NO: 3039 - DNA, 20 bp, Artificial sequence
  Synthetic oligonucleotide
gtgaagaagactgaagggaa

SEQ ID NO: 3040 - DNA, 20 bp, Artificial sequence
  Synthetic oligonucleotide
agtgaagaagactgaaggga

SEQ ID NO: 3041 - DNA, 20 bp, Artificial sequence
  Synthetic oligonucleotide
aagtgaagaagactgaaggg

SEQ ID NO: 3042 - DNA, 20 bp, Artificial sequence
  Synthetic oligonucleotide
gaagtgaagaagactgaagg

SEQ ID NO: 3043 - DNA, 20 bp, Artificial sequence
  Synthetic oligonucleotide
ggaagtgaagaagactgaag

SEQ ID NO: 3044 - DNA, 20 bp, Artificial sequence
  Synthetic oligonucleotide
gggaagtgaagaagactgaa

SEQ ID NO: 3045 - DNA, 20 bp, Artificial sequence
  Synthetic oligonucleotide
agggaagtgaagaagactga

SEQ ID NO: 3046 - DNA, 20 bp, Artificial sequence
  Synthetic oligonucleotide
tagggaagtgaagaagactg

SEQ ID NO: 3047 - DNA, 20 bp, Artificial sequence
  Synthetic oligonucleotide
atagggaagtgaagaagact

SEQ ID NO: 3048 - DNA, 20 bp, Artificial sequence
  Synthetic oligonucleotide
catagggaagtgaagaagac

SEQ ID NO: 3049 - DNA, 20 bp, Artificial sequence
  Synthetic oligonucleotide
gcatagggaagtgaagaaga

SEQ ID NO: 3050 - DNA, 20 bp, Artificial sequence
  Synthetic oligonucleotide
agcatagggaagtgaagaag

SEQ ID NO: 3051 - DNA, 20 bp, Artificial sequence
  Synthetic oligonucleotide
cagcatagggaagtgaagaa

SEQ ID NO: 3052 - DNA, 20 bp, Artificial sequence
  Synthetic oligonucleotide
gcagcatagggaagtgaaga

SEQ ID NO: 3053 - DNA, 20 bp, Artificial sequence
  Synthetic oligonucleotide
agcagcatagggaagtgaag

SEQ ID NO: 3054 - DNA, 20 bp, Artificial sequence
  Synthetic oligonucleotide
cagcagcatagggaagtgaa

SEQ ID NO: 3055 - DNA, 20 bp, Artificial sequence
  Synthetic oligonucleotide
tgtagcacatgaagcagcag

SEQ ID NO: 3056 - DNA, 20 bp, Artificial sequence
  Synthetic oligonucleotide
atgtagcacatgaagcagca

SEQ ID NO: 3057 - DNA, 20 bp, Artificial sequence
  Synthetic oligonucleotide
gatgtagcacatgaagcagc

SEQ ID NO: 3058 - DNA, 20 bp, Artificial sequence
  Synthetic oligonucleotide
agatgtagcacatgaagcag

SEQ ID NO: 3059 - DNA, 20 bp, Artificial sequence
  Synthetic oligonucleotide
gagatgtagcacatgaagca

SEQ ID NO: 3060 - DNA, 20 bp, Artificial sequence
  Synthetic oligonucleotide
tgagatgtagcacatgaagc

SEQ ID NO: 3061 - DNA, 20 bp, Artificial sequence
  Synthetic oligonucleotide
ctgagatgtagcacatgaag

SEQ ID NO: 3062 - DNA, 20 bp, Artificial sequence
  Synthetic oligonucleotide
tctgagatgtagcacatgaa

SEQ ID NO: 3063 - DNA, 20 bp, Artificial sequence
  Synthetic oligonucleotide
gtctgagatgtagcacatga

SEQ ID NO: 3064 - DNA, 20 bp, Artificial sequence
  Synthetic oligonucleotide
agtctgagatgtagcacatg

SEQ ID NO: 3065 - DNA, 20 bp, Artificial sequence
  Synthetic oligonucleotide
taagtctgagatgtagcaca

SEQ ID NO: 3066 - DNA, 20 bp, Artificial sequence
  Synthetic oligonucleotide
ttaagtctgagatgtagcac

SEQ ID NO: 3067 - DNA, 20 bp, Artificial sequence
  Synthetic oligonucleotide
tttaagtctgagatgtagca

SEQ ID NO: 3068 - DNA, 20 bp, Artificial sequence
  Synthetic oligonucleotide
ctttaagtctgagatgtagc

SEQ ID NO: 3069 - DNA, 20 bp, Artificial sequence
  Synthetic oligonucleotide
tctttaagtctgagatgtag

SEQ ID NO: 3070 - DNA, 20 bp, Artificial sequence
  Synthetic oligonucleotide
ctctttaagtctgagatgta

SEQ ID NO: 3071 - DNA, 20 bp, Artificial sequence
  Synthetic oligonucleotide
actctttaagtctgagatgt

SEQ ID NO: 3072 - DNA, 20 bp, Artificial sequence
  Synthetic oligonucleotide
aactctttaagtctgagatg

SEQ ID NO: 3073 - DNA, 20 bp, Artificial sequence
  Synthetic oligonucleotide
aaactctttaagtctgagat

SEQ ID NO: 3074 - DNA, 20 bp, Artificial sequence
  Synthetic oligonucleotide
gaaactctttaagtctgaga

SEQ ID NO: 3075 - DNA, 20 bp, Artificial sequence
  Synthetic oligonucleotide
agaaactctttaagtctgag

SEQ ID NO: 3076 - DNA, 20 bp, Artificial sequence
  Synthetic oligonucleotide
gagaaactctttaagtctga

SEQ ID NO: 3077 - DNA, 20 bp, Artificial sequence
  Synthetic oligonucleotide
agagaaactctttaagtctg

SEQ ID NO: 3078 - DNA, 20 bp, Artificial sequence
  Synthetic oligonucleotide
tcactgtagtagagaaactc

SEQ ID NO: 3079 - DNA, 20 bp, Artificial sequence
  Synthetic oligonucleotide
ttcactgtagtagagaaact

SEQ ID NO: 3080 - DNA, 20 bp, Artificial sequence
  Synthetic oligonucleotide
tttcactgtagtagagaaac

SEQ ID NO: 3081 - DNA, 20 bp, Artificial sequence
  Synthetic oligonucleotide
gttttcactgtagtagagaa

SEQ ID NO: 3082 - DNA, 20 bp, Artificial sequence
  Synthetic oligonucleotide
tgttttcactgtagtagaga

SEQ ID NO: 3083 - DNA, 20 bp, Artificial sequence
  Synthetic oligonucleotide
atgttttcactgtagtagag

SEQ ID NO: 3084 - DNA, 20 bp, Artificial sequence
  Synthetic oligonucleotide
aatgttttcactgtagtaga

SEQ ID NO: 3085 - DNA, 20 bp, Artificial sequence
  Synthetic oligonucleotide
gaatgttttcactgtagtag

SEQ ID NO: 3086 - DNA, 20 bp, Artificial sequence
  Synthetic oligonucleotide
agaatgttttcactgtagta

SEQ ID NO: 3087 - DNA, 20 bp, Artificial sequence
  Synthetic oligonucleotide
gagaatgttttcactgtagt

SEQ ID NO: 3088 - DNA, 20 bp, Artificial sequence
  Synthetic oligonucleotide
agagaatgttttcactgtag

SEQ ID NO: 3089 - DNA, 20 bp, Artificial sequence
  Synthetic oligonucleotide
tagagaatgttttcactgta

SEQ ID NO: 3090 - DNA, 20 bp, Artificial sequence
  Synthetic oligonucleotide
ctagagaatgttttcactgt

SEQ ID NO: 3091 - DNA, 20 bp, Artificial sequence
  Synthetic oligonucleotide
cctagagaatgttttcactg

SEQ ID NO: 3092 - DNA, 20 bp, Artificial sequence
  Synthetic oligonucleotide
ccctagagaatgttttcact

SEQ ID NO: 3093 - DNA, 20 bp, Artificial sequence
  Synthetic oligonucleotide
accctagagaatgttttcac

SEQ ID NO: 3094 - DNA, 20 bp, Artificial sequence
  Synthetic oligonucleotide
gaccctagagaatgttttca

SEQ ID NO: 3095 - DNA, 20 bp, Artificial sequence
  Synthetic oligonucleotide
agaccctagagaatgttttc

SEQ ID NO: 3096 - DNA, 20 bp, Artificial sequence
  Synthetic oligonucleotide
aagaccctagagaatgtttt

SEQ ID NO: 3097 - DNA, 20 bp, Artificial sequence
  Synthetic oligonucleotide
aaagaccctagagaatgttt

SEQ ID NO: 3098 - DNA, 20 bp, Artificial sequence
  Synthetic oligonucleotide
gaaagaccctagagaatgtt

SEQ ID NO: 3099 - DNA, 20 bp, Artificial sequence
  Synthetic oligonucleotide
tgaaagaccctagagaatgt

SEQ ID NO: 3100 - DNA, 20 bp, Artificial sequence
  Synthetic oligonucleotide
atgaaagaccctagagaatg

SEQ ID NO: 3101 - DNA, 20 bp, Artificial sequence
  Synthetic oligonucleotide
gatgaaagaccctagagaat

SEQ ID NO: 3102 - DNA, 20 bp, Artificial sequence
  Synthetic oligonucleotide
tgatgaaagaccctagagaa

SEQ ID NO: 3103 - DNA, 20 bp, Artificial sequence
  Synthetic oligonucleotide
ctgatgaaagaccctagaga

SEQ ID NO: 3104 - DNA, 20 bp, Artificial sequence
  Synthetic oligonucleotide
cctgatgaaagaccctagag

SEQ ID NO: 3105 - DNA, 20 bp, Artificial sequence
  Synthetic oligonucleotide
gcctgatgaaagaccctaga

SEQ ID NO: 3106 - DNA, 20 bp, Artificial sequence
  Synthetic oligonucleotide
ggcctgatgaaagaccctag

SEQ ID NO: 3107 - DNA, 20 bp, Artificial sequence
  Synthetic oligonucleotide
aggcctgatgaaagacccta

SEQ ID NO: 3108 - DNA, 20 bp, Artificial sequence
  Synthetic oligonucleotide
aaggcctgatgaaagaccct

SEQ ID NO: 3109 - DNA, 20 bp, Artificial sequence
  Synthetic oligonucleotide
aaaggcctgatgaaagaccc

SEQ ID NO: 3110 - DNA, 20 bp, Artificial sequence
  Synthetic oligonucleotide
taaaggcctgatgaaagacc

SEQ ID NO: 3111 - DNA, 20 bp, Artificial sequence
  Synthetic oligonucleotide
ctaaaggcctgatgaaagac

SEQ ID NO: 3112 - DNA, 20 bp, Artificial sequence
  Synthetic oligonucleotide
actaaaggcctgatgaaaga

SEQ ID NO: 3113 - DNA, 20 bp, Artificial sequence
  Synthetic oligonucleotide
aactaaaggcctgatgaaag

SEQ ID NO: 3114 - DNA, 20 bp, Artificial sequence
  Synthetic oligonucleotide
taactaaaggcctgatgaaa

SEQ ID NO: 3115 - DNA, 20 bp, Artificial sequence
  Synthetic oligonucleotide
ataactaaaggcctgatgaa

SEQ ID NO: 3116 - DNA, 20 bp, Artificial sequence
  Synthetic oligonucleotide
aataactaaaggcctgatga

SEQ ID NO: 3117 - DNA, 20 bp, Artificial sequence
  Synthetic oligonucleotide
aaataactaaaggcctgatg

SEQ ID NO: 3118 - DNA, 20 bp, Artificial sequence
  Synthetic oligonucleotide
aaaataactaaaggcctgat

SEQ ID NO: 3119 - DNA, 20 bp, Artificial sequence
  Synthetic oligonucleotide
taaaataactaaaggcctga

SEQ ID NO: 3120 - DNA, 20 bp, Artificial sequence
  Synthetic oligonucleotide
ctaaaataactaaaggcctg

SEQ ID NO: 3121 - DNA, 20 bp, Artificial sequence
  Synthetic oligonucleotide
cctaaaataactaaaggcct

SEQ ID NO: 3122 - DNA, 20 bp, Artificial sequence
  Synthetic oligonucleotide
ccctaaaataactaaaggcc

SEQ ID NO: 3123 - DNA, 20 bp, Artificial sequence
  Synthetic oligonucleotide
tccctaaaataactaaaggc

SEQ ID NO: 3124 - DNA, 20 bp, Artificial sequence
  Synthetic oligonucleotide
atccctaaaataactaaagg

SEQ ID NO: 3125 - DNA, 20 bp, Artificial sequence
  Synthetic oligonucleotide
tatccctaaaataactaaag

SEQ ID NO: 3126 - DNA, 20 bp, Artificial sequence
  Synthetic oligonucleotide
gtttttatccctaaaataac

SEQ ID NO: 3127 - DNA, 20 bp, Artificial sequence
  Synthetic oligonucleotide
caatagtttttatccctaaa

SEQ ID NO: 3128 - DNA, 20 bp, Artificial sequence
  Synthetic oligonucleotide
tcaatagtttttatccctaa

SEQ ID NO: 3129 - DNA, 20 bp, Artificial sequence
  Synthetic oligonucleotide
atcaatagtttttatcccta

SEQ ID NO: 3130 - DNA, 20 bp, Artificial sequence
  Synthetic oligonucleotide
tatcaatagtttttatccct

SEQ ID NO: 3131 - DNA, 20 bp, Artificial sequence
  Synthetic oligonucleotide
ttatcaatagtttttatccc

SEQ ID NO: 3132 - DNA, 20 bp, Artificial sequence
  Synthetic oligonucleotide
gtcctttttatcaatagttt

SEQ ID NO: 3133 - DNA, 20 bp, Artificial sequence
  Synthetic oligonucleotide
tgtcctttttatcaatagtt

SEQ ID NO: 3134 - DNA, 20 bp, Artificial sequence
  Synthetic oligonucleotide
ttgtcctttttatcaatagt

SEQ ID NO: 3135 - DNA, 20 bp, Artificial sequence
  Synthetic oligonucleotide
cttgtcctttttatcaatag

SEQ ID NO: 3136 - DNA, 20 bp, Artificial sequence
  Synthetic oligonucleotide
ccttgtcctttttatcaata

SEQ ID NO: 3137 - DNA, 20 bp, Artificial sequence
  Synthetic oligonucleotide
tccttgtcctttttatcaat

SEQ ID NO: 3138 - DNA, 20 bp, Artificial sequence
  Synthetic oligonucleotide
atccttgtcctttttatcaa

SEQ ID NO: 3139 - DNA, 20 bp, Artificial sequence
  Synthetic oligonucleotide
tatccttgtcctttttatca

SEQ ID NO: 3140 - DNA, 20 bp, Artificial sequence
  Synthetic oligonucleotide
ctatccttgtcctttttatc

SEQ ID NO: 3141 - DNA, 20 bp, Artificial sequence
  Synthetic oligonucleotide
tctatccttgtcctttttat

SEQ ID NO: 3142 - DNA, 20 bp, Artificial sequence
  Synthetic oligonucleotide
ttctatccttgtccttttta

SEQ ID NO: 3143 - DNA, 20 bp, Artificial sequence
  Synthetic oligonucleotide
gttctatccttgtccttttt

SEQ ID NO: 3144 - DNA, 20 bp, Artificial sequence
  Synthetic oligonucleotide
tgttctatccttgtcctttt

SEQ ID NO: 3145 - DNA, 20 bp, Artificial sequence
  Synthetic oligonucleotide
ctgttctatccttgtccttt

SEQ ID NO: 3146 - DNA, 20 bp, Artificial sequence
  Synthetic oligonucleotide
tctgttctatccttgtcctt

SEQ ID NO: 3147 - DNA, 20 bp, Artificial sequence
  Synthetic oligonucleotide
ctctgttctatccttgtcct

SEQ ID NO: 3148 - DNA, 20 bp, Artificial sequence
  Synthetic oligonucleotide
tctctgttctatccttgtcc

SEQ ID NO: 3149 - DNA, 20 bp, Artificial sequence
  Synthetic oligonucleotide
ttctctgttctatccttgtc

SEQ ID NO: 3150 - DNA, 20 bp, Artificial sequence
  Synthetic oligonucleotide
tttctctgttctatccttgt

SEQ ID NO: 3151 - DNA, 20 bp, Artificial sequence
  Synthetic oligonucleotide
ttttctctgttctatccttg

SEQ ID NO: 3152 - DNA, 20 bp, Artificial sequence
  Synthetic oligonucleotide
attttctctgttctatcctt

SEQ ID NO: 3153 - DNA, 20 bp, Artificial sequence
  Synthetic oligonucleotide
aattttctctgttctatcct

SEQ ID NO: 3154 - DNA, 20 bp, Artificial sequence
  Synthetic oligonucleotide
aaattttctctgttctatcc

SEQ ID NO: 3155 - DNA, 20 bp, Artificial sequence
  Synthetic oligonucleotide
taaattttctctgttctatc

SEQ ID NO: 3156 - DNA, 20 bp, Artificial sequence
  Synthetic oligonucleotide
ctttaaattttctctgttct

SEQ ID NO: 3157 - DNA, 20 bp, Artificial sequence
  Synthetic oligonucleotide
actttaaattttctctgttc

SEQ ID NO: 3158 - DNA, 20 bp, Artificial sequence
  Synthetic oligonucleotide
gactttaaattttctctgtt

SEQ ID NO: 3159 - DNA, 20 bp, Artificial sequence
  Synthetic oligonucleotide
ggactttaaattttctctgt

SEQ ID NO: 3160 - DNA, 20 bp, Artificial sequence
  Synthetic oligonucleotide
aggactttaaattttctctg

SEQ ID NO: 3161 - DNA, 20 bp, Artificial sequence
  Synthetic oligonucleotide
caggactttaaattttctct

SEQ ID NO: 3162 - DNA, 20 bp, Artificial sequence
  Synthetic oligonucleotide
acaggactttaaattttctc

SEQ ID NO: 3163 - DNA, 20 bp, Artificial sequence
  Synthetic oligonucleotide
aacaggactttaaattttct

SEQ ID NO: 3164 - DNA, 20 bp, Artificial sequence
  Synthetic oligonucleotide
gaacaggactttaaattttc

SEQ ID NO: 3165 - DNA, 20 bp, Artificial sequence
  Synthetic oligonucleotide
ggaacaggactttaaatttt

SEQ ID NO: 3166 - DNA, 20 bp, Artificial sequence
  Synthetic oligonucleotide
cggaacaggactttaaattt

SEQ ID NO: 3167 - DNA, 20 bp, Artificial sequence
  Synthetic oligonucleotide
ccggaacaggactttaaatt

SEQ ID NO: 3168 - DNA, 20 bp, Artificial sequence
  Synthetic oligonucleotide
cccggaacaggactttaaat

SEQ ID NO: 3169 - DNA, 20 bp, Artificial sequence
  Synthetic oligonucleotide
acccggaacaggactttaaa

SEQ ID NO: 3170 - DNA, 20 bp, Artificial sequence
  Synthetic oligonucleotide
aacccggaacaggactttaa

SEQ ID NO: 3171 - DNA, 20 bp, Artificial sequence
  Synthetic oligonucleotide
aaacccggaacaggacttta

SEQ ID NO: 3172 - DNA, 20 bp, Artificial sequence
  Synthetic oligonucleotide
aaaacccggaacaggacttt

SEQ ID NO: 3173 - DNA, 20 bp, Artificial sequence
  Synthetic oligonucleotide
aaaaacccggaacaggactt

SEQ ID NO: 3174 - DNA, 20 bp, Artificial sequence
  Synthetic oligonucleotide
ctctgagtttttaaagaaaa

SEQ ID NO: 3175 - DNA, 20 bp, Artificial sequence
  Synthetic oligonucleotide
tctctgagtttttaaagaaa

SEQ ID NO: 3176 - DNA, 20 bp, Artificial sequence
  Synthetic oligonucleotide
gtctctgagtttttaaagaa

SEQ ID NO: 3177 - DNA, 20 bp, Artificial sequence
  Synthetic oligonucleotide
agtctctgagtttttaaaga

SEQ ID NO: 3178 - DNA, 20 bp, Artificial sequence
  Synthetic oligonucleotide
cagtctctgagtttttaaag

SEQ ID NO: 3179 - DNA, 20 bp, Artificial sequence
  Synthetic oligonucleotide
tcagtctctgagtttttaaa

SEQ ID NO: 3180 - DNA, 20 bp, Artificial sequence
  Synthetic oligonucleotide
atattgaacatcagtctctg

SEQ ID NO: 3181 - DNA, 20 bp, Artificial sequence
  Synthetic oligonucleotide
gatattgaacatcagtctct

SEQ ID NO: 3182 - DNA, 20 bp, Artificial sequence
  Synthetic oligonucleotide
ggatattgaacatcagtctc

SEQ ID NO: 3183 - DNA, 20 bp, Artificial sequence
  Synthetic oligonucleotide
gggatattgaacatcagtct

SEQ ID NO: 3184 - DNA, 20 bp, Artificial sequence
  Synthetic oligonucleotide
tgggatattgaacatcagtc

SEQ ID NO: 3185 - DNA, 20 bp, Artificial sequence
  Synthetic oligonucleotide
ttgggatattgaacatcagt

SEQ ID NO: 3186 - DNA, 20 bp, Artificial sequence
  Synthetic oligonucleotide
tttgggatattgaacatcag

SEQ ID NO: 3187 - DNA, 20 bp, Artificial sequence
  Synthetic oligonucleotide
gtttgggatattgaacatca

SEQ ID NO: 3188 - DNA, 20 bp, Artificial sequence
  Synthetic oligonucleotide
ggtttgggatattgaacatc

SEQ ID NO: 3189 - DNA, 20 bp, Artificial sequence
  Synthetic oligonucleotide
tggtttgggatattgaacat

SEQ ID NO: 3190 - DNA, 20 bp, Artificial sequence
  Synthetic oligonucleotide
ctggtttgggatattgaaca

SEQ ID NO: 3191 - DNA, 20 bp, Artificial sequence
  Synthetic oligonucleotide
actggtttgggatattgaac

SEQ ID NO: 3192 - DNA, 20 bp, Artificial sequence
  Synthetic oligonucleotide
tactggtttgggatattgaa

SEQ ID NO: 3193 - DNA, 20 bp, Artificial sequence
  Synthetic oligonucleotide
ttactggtttgggatattga

SEQ ID NO: 3194 - DNA, 20 bp, Artificial sequence
  Synthetic oligonucleotide
tttactggtttgggatattg

SEQ ID NO: 3195 - DNA, 20 bp, Artificial sequence
  Synthetic oligonucleotide
ttttactggtttgggatatt

SEQ ID NO: 3196 - DNA, 20 bp, Artificial sequence
  Synthetic oligonucleotide
attttactggtttgggatat

SEQ ID NO: 3197 - DNA, 20 bp, Artificial sequence
  Synthetic oligonucleotide
cattttactggtttgggata

SEQ ID NO: 3198 - DNA, 20 bp, Artificial sequence
  Synthetic oligonucleotide
ccattttactggtttgggat

SEQ ID NO: 3199 - DNA, 20 bp, Artificial sequence
  Synthetic oligonucleotide
gtattttcaccattttactg

SEQ ID NO: 3200 - DNA, 20 bp, Artificial sequence
  Synthetic oligonucleotide
agtattttcaccattttact

SEQ ID NO: 3201 - DNA, 20 bp, Artificial sequence
  Synthetic oligonucleotide
tagtattttcaccattttac

SEQ ID NO: 3202 - DNA, 20 bp, Artificial sequence
  Synthetic oligonucleotide
catagtattttcaccatttt

SEQ ID NO: 3203 - DNA, 20 bp, Artificial sequence
  Synthetic oligonucleotide
tcatagtattttcaccattt

SEQ ID NO: 3204 - DNA, 20 bp, Artificial sequence
  Synthetic oligonucleotide
ctcatagtattttcaccatt

SEQ ID NO: 3205 - DNA, 20 bp, Artificial sequence
  Synthetic oligonucleotide
gctcatagtattttcaccat

SEQ ID NO: 3206 - DNA, 20 bp, Artificial sequence
  Synthetic oligonucleotide
agctcatagtattttcacca

SEQ ID NO: 3207 - DNA, 20 bp, Artificial sequence
  Synthetic oligonucleotide
aagctcatagtattttcacc

SEQ ID NO: 3208 - DNA, 20 bp, Artificial sequence
  Synthetic oligonucleotide
caagctcatagtattttcac

SEQ ID NO: 3209 - DNA, 20 bp, Artificial sequence
  Synthetic oligonucleotide
acaagctcatagtattttca

SEQ ID NO: 3210 - DNA, 20 bp, Artificial sequence
  Synthetic oligonucleotide
aacaagctcatagtattttc

SEQ ID NO: 3211 - DNA, 20 bp, Artificial sequence
  Synthetic oligonucleotide
aaacaagctcatagtatttt

SEQ ID NO: 3212 - DNA, 20 bp, Artificial sequence
  Synthetic oligonucleotide
aaaacaagctcatagtattt

SEQ ID NO: 3213 - DNA, 20 bp, Artificial sequence
  Synthetic oligonucleotide
aaaaacaagctcatagtatt

SEQ ID NO: 3214 - DNA, 20 bp, Artificial sequence
  Synthetic oligonucleotide
ctttcacataaagagatact

SEQ ID NO: 3215 - DNA, 20 bp, Artificial sequence
  Synthetic oligonucleotide
gctttcacataaagagatac

SEQ ID NO: 3216 - DNA, 20 bp, Artificial sequence
  Synthetic oligonucleotide
tgctttcacataaagagata

SEQ ID NO: 3217 - DNA, 20 bp, Artificial sequence
  Synthetic oligonucleotide
ttgctttcacataaagagat

SEQ ID NO: 3218 - DNA, 20 bp, Artificial sequence
  Synthetic oligonucleotide
attgctttcacataaagaga

SEQ ID NO: 3219 - DNA, 20 bp, Artificial sequence
  Synthetic oligonucleotide
aattgctttcacataaagag

SEQ ID NO: 3220 - DNA, 20 bp, Artificial sequence
  Synthetic oligonucleotide
caattgctttcacataaaga

SEQ ID NO: 3221 - DNA, 20 bp, Artificial sequence
  Synthetic oligonucleotide
acaattgctttcacataaag

SEQ ID NO: 3222 - DNA, 20 bp, Artificial sequence
  Synthetic oligonucleotide
gacaattgctttcacataaa

SEQ ID NO: 3223 - DNA, 20 bp, Artificial sequence
  Synthetic oligonucleotide
tgacaattgctttcacataa

SEQ ID NO: 3224 - DNA, 20 bp, Artificial sequence
  Synthetic oligonucleotide
atgacaattgctttcacata

SEQ ID NO: 3225 - DNA, 20 bp, Artificial sequence
  Synthetic oligonucleotide
tatgacaattgctttcacat

SEQ ID NO: 3226 - DNA, 20 bp, Artificial sequence
  Synthetic oligonucleotide
atatgacaattgctttcaca

SEQ ID NO: 3227 - DNA, 20 bp, Artificial sequence
  Synthetic oligonucleotide
gatatgacaattgctttcac

SEQ ID NO: 3228 - DNA, 20 bp, Artificial sequence
  Synthetic oligonucleotide
tgatatgacaattgctttca

SEQ ID NO: 3229 - DNA, 20 bp, Artificial sequence
  Synthetic oligonucleotide
ttgatatgacaattgctttc

SEQ ID NO: 3230 - DNA, 20 bp, Artificial sequence
  Synthetic oligonucleotide
tttgatatgacaattgcttt

SEQ ID NO: 3231 - DNA, 20 bp, Artificial sequence
  Synthetic oligonucleotide
ttttgatatgacaattgctt

SEQ ID NO: 3232 - DNA, 20 bp, Artificial sequence
  Synthetic oligonucleotide
gttttgatatgacaattgct

SEQ ID NO: 3233 - DNA, 20 bp, Artificial sequence
  Synthetic oligonucleotide
tgttttgatatgacaattgc

SEQ ID NO: 3234 - DNA, 20 bp, Artificial sequence
  Synthetic oligonucleotide
gtgttttgatatgacaattg

SEQ ID NO: 3235 - DNA, 20 bp, Artificial sequence
  Synthetic oligonucleotide
tgtgttttgatatgacaatt

SEQ ID NO: 3236 - DNA, 20 bp, Artificial sequence
  Synthetic oligonucleotide
ctgtgttttgatatgacaat

SEQ ID NO: 3237 - DNA, 20 bp, Artificial sequence
  Synthetic oligonucleotide
gctgtgttttgatatgacaa

SEQ ID NO: 3238 - DNA, 20 bp, Artificial sequence
  Synthetic oligonucleotide
tgctgtgttttgatatgaca

SEQ ID NO: 3239 - DNA, 20 bp, Artificial sequence
  Synthetic oligonucleotide
atgctgtgttttgatatgac

SEQ ID NO: 3240 - DNA, 20 bp, Artificial sequence
  Synthetic oligonucleotide
tatgctgtgttttgatatga

SEQ ID NO: 3241 - DNA, 20 bp, Artificial sequence
  Synthetic oligonucleotide
gtatgctgtgttttgatatg

SEQ ID NO: 3242 - DNA, 20 bp, Artificial sequence
  Synthetic oligonucleotide
tgtatgctgtgttttgatat

SEQ ID NO: 3243 - DNA, 20 bp, Artificial sequence
  Synthetic oligonucleotide
atgtatgctgtgttttgata

SEQ ID NO: 3244 - DNA, 20 bp, Artificial sequence
  Synthetic oligonucleotide
tatgtatgctgtgttttgat

SEQ ID NO: 3245 - DNA, 20 bp, Artificial sequence
  Synthetic oligonucleotide
gtatgtatgctgtgttttga

SEQ ID NO: 3246 - DNA, 20 bp, Artificial sequence
  Synthetic oligonucleotide
cgtatgtatgctgtgttttg

SEQ ID NO: 3247 - DNA, 20 bp, Artificial sequence
  Synthetic oligonucleotide
acgtatgtatgctgtgtttt

SEQ ID NO: 3248 - DNA, 20 bp, Artificial sequence
  Synthetic oligonucleotide
aacgtatgtatgctgtgttt

SEQ ID NO: 3249 - DNA, 20 bp, Artificial sequence
  Synthetic oligonucleotide
gaacgtatgtatgctgtgtt

SEQ ID NO: 3250 - DNA, 20 bp, Artificial sequence
  Synthetic oligonucleotide
tgaacgtatgtatgctgtgt

SEQ ID NO: 3251 - DNA, 20 bp, Artificial sequence
  Synthetic oligonucleotide
ttgaacgtatgtatgctgtg

SEQ ID NO: 3252 - DNA, 20 bp, Artificial sequence
  Synthetic oligonucleotide
gttgaacgtatgtatgctgt

SEQ ID NO: 3253 - DNA, 20 bp, Artificial sequence
  Synthetic oligonucleotide
ggttgaacgtatgtatgctg

SEQ ID NO: 3254 - DNA, 20 bp, Artificial sequence
  Synthetic oligonucleotide
aggttgaacgtatgtatgct

SEQ ID NO: 3255 - DNA, 20 bp, Artificial sequence
  Synthetic oligonucleotide
taggttgaacgtatgtatgc

SEQ ID NO: 3256 - DNA, 20 bp, Artificial sequence
  Synthetic oligonucleotide
ttaggttgaacgtatgtatg

SEQ ID NO: 3257 - DNA, 20 bp, Artificial sequence
  Synthetic oligonucleotide
gttaggttgaacgtatgtat

SEQ ID NO: 3258 - DNA, 20 bp, Artificial sequence
  Synthetic oligonucleotide
ggttaggttgaacgtatgta

SEQ ID NO: 3259 - DNA, 20 bp, Artificial sequence
  Synthetic oligonucleotide
tggttaggttgaacgtatgt

SEQ ID NO: 3260 - DNA, 20 bp, Artificial sequence
  Synthetic oligonucleotide
ttggttaggttgaacgtatg

SEQ ID NO: 3261 - DNA, 20 bp, Artificial sequence
  Synthetic oligonucleotide
tttggttaggttgaacgtat

SEQ ID NO: 3262 - DNA, 20 bp, Artificial sequence
  Synthetic oligonucleotide
atttggttaggttgaacgta

SEQ ID NO: 3263 - DNA, 20 bp, Artificial sequence
  Synthetic oligonucleotide
tatttggttaggttgaacgt

SEQ ID NO: 3264 - DNA, 20 bp, Artificial sequence
  Synthetic oligonucleotide
atatttggttaggttgaacg

SEQ ID NO: 3265 - DNA, 20 bp, Artificial sequence
  Synthetic oligonucleotide
gatatttggttaggttgaac

SEQ ID NO: 3266 - DNA, 20 bp, Artificial sequence
  Synthetic oligonucleotide
agatatttggttaggttgaa

SEQ ID NO: 3267 - DNA, 20 bp, Artificial sequence
  Synthetic oligonucleotide
aagatatttggttaggttga

SEQ ID NO: 3268 - DNA, 20 bp, Artificial sequence
  Synthetic oligonucleotide
aaagatatttggttaggttg

SEQ ID NO: 3269 - DNA, 20 bp, Artificial sequence
  Synthetic oligonucleotide
taaagatatttggttaggtt

SEQ ID NO: 3270 - DNA, 20 bp, Artificial sequence
  Synthetic oligonucleotide
gtaaagatatttggttaggt

SEQ ID NO: 3271 - DNA, 20 bp, Artificial sequence
  Synthetic oligonucleotide
tgtaaagatatttggttagg

SEQ ID NO: 3272 - DNA, 20 bp, Artificial sequence
  Synthetic oligonucleotide
gtgtaaagatatttggttag

SEQ ID NO: 3273 - DNA, 20 bp, Artificial sequence
  Synthetic oligonucleotide
agtgtaaagatatttggtta

SEQ ID NO: 3274 - DNA, 20 bp, Artificial sequence
  Synthetic oligonucleotide
aagtgtaaagatatttggtt

SEQ ID NO: 3275 - DNA, 20 bp, Artificial sequence
  Synthetic oligonucleotide
aaagtgtaaagatatttggt

SEQ ID NO: 3276 - DNA, 20 bp, Artificial sequence
  Synthetic oligonucleotide
aaaagtgtaaagatatttgg

SEQ ID NO: 3277 - DNA, 20 bp, Artificial sequence
  Synthetic oligonucleotide
gaaagaaaaagtgtaaagat

SEQ ID NO: 3278 - DNA, 20 bp, Artificial sequence
  Synthetic oligonucleotide
tgaaagaaaaagtgtaaaga

SEQ ID NO: 3279 - DNA, 20 bp, Artificial sequence
  Synthetic oligonucleotide
ctgaaagaaaaagtgtaaag

SEQ ID NO: 3280 - DNA, 20 bp, Artificial sequence
  Synthetic oligonucleotide
cctgaaagaaaaagtgtaaa

SEQ ID NO: 3281 - DNA, 20 bp, Artificial sequence
  Synthetic oligonucleotide
tcctgaaagaaaaagtgtaa

SEQ ID NO: 3282 - DNA, 20 bp, Artificial sequence
  Synthetic oligonucleotide
ctcctgaaagaaaaagtgta

SEQ ID NO: 3283 - DNA, 20 bp, Artificial sequence
  Synthetic oligonucleotide
tctcctgaaagaaaaagtgt

SEQ ID NO: 3284 - DNA, 20 bp, Artificial sequence
  Synthetic oligonucleotide
gtctcctgaaagaaaaagtg

SEQ ID NO: 3285 - DNA, 20 bp, Artificial sequence
  Synthetic oligonucleotide
tgtctcctgaaagaaaaagt

SEQ ID NO: 3286 - DNA, 20 bp, Artificial sequence
  Synthetic oligonucleotide
ttgtctcctgaaagaaaaag

SEQ ID NO: 3287 - DNA, 20 bp, Artificial sequence
  Synthetic oligonucleotide
cttgtctcctgaaagaaaaa

SEQ ID NO: 3288 - DNA, 20 bp, Artificial sequence
  Synthetic oligonucleotide
ccttgtctcctgaaagaaaa

SEQ ID NO: 3289 - DNA, 20 bp, Artificial sequence
  Synthetic oligonucleotide
cccttgtctcctgaaagaaa

SEQ ID NO: 3290 - DNA, 20 bp, Artificial sequence
  Synthetic oligonucleotide
acccttgtctcctgaaagaa

SEQ ID NO: 3291 - DNA, 20 bp, Artificial sequence
  Synthetic oligonucleotide
aacccttgtctcctgaaaga

SEQ ID NO: 3292 - DNA, 20 bp, Artificial sequence
  Synthetic oligonucleotide
gaacccttgtctcctgaaag

SEQ ID NO: 3293 - DNA, 20 bp, Artificial sequence
  Synthetic oligonucleotide
agaacccttgtctcctgaaa

SEQ ID NO: 3294 - DNA, 20 bp, Artificial sequence
  Synthetic oligonucleotide
aagaacccttgtctcctgaa

SEQ ID NO: 3295 - DNA, 20 bp, Artificial sequence
  Synthetic oligonucleotide
aaagaacccttgtctcctga

SEQ ID NO: 3296 - DNA, 20 bp, Artificial sequence
  Synthetic oligonucleotide
caaagaacccttgtctcctg

SEQ ID NO: 3297 - DNA, 20 bp, Artificial sequence
  Synthetic oligonucleotide
ccaaagaacccttgtctcct

SEQ ID NO: 3298 - DNA, 20 bp, Artificial sequence
  Synthetic oligonucleotide
cccaaagaacccttgtctcc

SEQ ID NO: 3299 - DNA, 20 bp, Artificial sequence
  Synthetic oligonucleotide
acccaaagaacccttgtctc

SEQ ID NO: 3300 - DNA, 20 bp, Artificial sequence
  Synthetic oligonucleotide
gacccaaagaacccttgtct

SEQ ID NO: 3301 - DNA, 20 bp, Artificial sequence
  Synthetic oligonucleotide
ggacccaaagaacccttgtc

SEQ ID NO: 3302 - DNA, 20 bp, Artificial sequence
  Synthetic oligonucleotide
tgaaagggacccaaagaacc

SEQ ID NO: 3303 - DNA, 20 bp, Artificial sequence
  Synthetic oligonucleotide
ttgaaagggacccaaagaac

SEQ ID NO: 3304 - DNA, 20 bp, Artificial sequence
  Synthetic oligonucleotide
tttgaaagggacccaaagaa

SEQ ID NO: 3305 - DNA, 20 bp, Artificial sequence
  Synthetic oligonucleotide
gtttgaaagggacccaaaga

SEQ ID NO: 3306 - DNA, 20 bp, Artificial sequence
  Synthetic oligonucleotide
cgtttgaaagggacccaaag

SEQ ID NO: 3307 - DNA, 20 bp, Artificial sequence
  Synthetic oligonucleotide
ccaagataccgtttgaaagg

SEQ ID NO: 3308 - DNA, 20 bp, Artificial sequence
  Synthetic oligonucleotide
accaagataccgtttgaaag

SEQ ID NO: 3309 - DNA, 20 bp, Artificial sequence
  Synthetic oligonucleotide
caccaagataccgtttgaaa

SEQ ID NO: 3310 - DNA, 20 bp, Artificial sequence
  Synthetic oligonucleotide
acaccaagataccgtttgaa

SEQ ID NO: 3311 - DNA, 20 bp, Artificial sequence
  Synthetic oligonucleotide
aacaccaagataccgtttga

SEQ ID NO: 3312 - DNA, 20 bp, Artificial sequence
  Synthetic oligonucleotide
taacaccaagataccgtttg

SEQ ID NO: 3313 - DNA, 20 bp, Artificial sequence
  Synthetic oligonucleotide
ataacaccaagataccgttt

SEQ ID NO: 3314 - DNA, 20 bp, Artificial sequence
  Synthetic oligonucleotide
aataacaccaagataccgtt

SEQ ID NO: 3315 - DNA, 20 bp, Artificial sequence
  Synthetic oligonucleotide
taataacaccaagataccgt

SEQ ID NO: 3316 - DNA, 20 bp, Artificial sequence
  Synthetic oligonucleotide
gtaataacaccaagataccg

SEQ ID NO: 3317 - DNA, 20 bp, Artificial sequence
  Synthetic oligonucleotide
tgtaataacaccaagatacc

SEQ ID NO: 3318 - DNA, 20 bp, Artificial sequence
  Synthetic oligonucleotide
atgtaataacaccaagatac

SEQ ID NO: 3319 - DNA, 20 bp, Artificial sequence
  Synthetic oligonucleotide
aatgtaataacaccaagata

SEQ ID NO: 3320 - DNA, 20 bp, Artificial sequence
  Synthetic oligonucleotide
taatgtaataacaccaagat

SEQ ID NO: 3321 - DNA, 20 bp, Artificial sequence
  Synthetic oligonucleotide
ataatgtaataacaccaaga

SEQ ID NO: 3322 - DNA, 20 bp, Artificial sequence
  Synthetic oligonucleotide
cataatgtaataacaccaag

SEQ ID NO: 3323 - DNA, 20 bp, Artificial sequence
  Synthetic oligonucleotide
gcataatgtaataacaccaa

SEQ ID NO: 3324 - DNA, 20 bp, Artificial sequence
  Synthetic oligonucleotide
ggcataatgtaataacacca

SEQ ID NO: 3325 - DNA, 20 bp, Artificial sequence
  Synthetic oligonucleotide
aggcataatgtaataacacc

SEQ ID NO: 3326 - DNA, 20 bp, Artificial sequence
  Synthetic oligonucleotide
taggcataatgtaataacac

SEQ ID NO: 3327 - DNA, 20 bp, Artificial sequence
  Synthetic oligonucleotide
gataggcataatgtaataac

SEQ ID NO: 3328 - DNA, 20 bp, Artificial sequence
  Synthetic oligonucleotide
agataggcataatgtaataa

SEQ ID NO: 3329 - DNA, 20 bp, Artificial sequence
  Synthetic oligonucleotide
tagataggcataatgtaata

SEQ ID NO: 3330 - DNA, 20 bp, Artificial sequence
  Synthetic oligonucleotide
atagataggcataatgtaat

SEQ ID NO: 3331 - DNA, 20 bp, Artificial sequence
  Synthetic oligonucleotide
aatagataggcataatgtaa

SEQ ID NO: 3332 - DNA, 20 bp, Artificial sequence
  Synthetic oligonucleotide
caatagataggcataatgta

SEQ ID NO: 3333 - DNA, 20 bp, Artificial sequence
  Synthetic oligonucleotide
gcaatagataggcataatgt

SEQ ID NO: 3334 - DNA, 20 bp, Artificial sequence
  Synthetic oligonucleotide
ggcaatagataggcataatg

SEQ ID NO: 3335 - DNA, 20 bp, Artificial sequence
  Synthetic oligonucleotide
gggcaatagataggcataat

SEQ ID NO: 3336 - DNA, 20 bp, Artificial sequence
  Synthetic oligonucleotide
agggcaatagataggcataa

SEQ ID NO: 3337 - DNA, 20 bp, Artificial sequence
  Synthetic oligonucleotide
aagggcaatagataggcata

SEQ ID NO: 3338 - DNA, 20 bp, Artificial sequence
  Synthetic oligonucleotide
taagggcaatagataggcat

SEQ ID NO: 3339 - DNA, 20 bp, Artificial sequence
  Synthetic oligonucleotide
ataagggcaatagataggca

SEQ ID NO: 3340 - DNA, 20 bp, Artificial sequence
  Synthetic oligonucleotide
tataagggcaatagataggc

SEQ ID NO: 3341 - DNA, 20 bp, Artificial sequence
  Synthetic oligonucleotide
ttataagggcaatagatagg

SEQ ID NO: 3342 - DNA, 20 bp, Artificial sequence
  Synthetic oligonucleotide
attataagggcaatagatag

SEQ ID NO: 3343 - DNA, 20 bp, Artificial sequence
  Synthetic oligonucleotide
tattataagggcaatagata

SEQ ID NO: 3344 - DNA, 20 bp, Artificial sequence
  Synthetic oligonucleotide
atattataagggcaatagat

SEQ ID NO: 3345 - DNA, 20 bp, Artificial sequence
  Synthetic oligonucleotide
gatattataagggcaataga

SEQ ID NO: 3346 - DNA, 20 bp, Artificial sequence
  Synthetic oligonucleotide
tgatattataagggcaatag

SEQ ID NO: 3347 - DNA, 20 bp, Artificial sequence
  Synthetic oligonucleotide
gtgatattataagggcaata

SEQ ID NO: 3348 - DNA, 20 bp, Artificial sequence
  Synthetic oligonucleotide
agtgatattataagggcaat

SEQ ID NO: 3349 - DNA, 20 bp, Artificial sequence
  Synthetic oligonucleotide
aagtgatattataagggcaa

SEQ ID NO: 3350 - DNA, 20 bp, Artificial sequence
  Synthetic oligonucleotide
caagtgatattataagggca

SEQ ID NO: 3351 - DNA, 20 bp, Artificial sequence
  Synthetic oligonucleotide
ccaagtgatattataagggc

SEQ ID NO: 3352 - DNA, 20 bp, Artificial sequence
  Synthetic oligonucleotide
cccaagtgatattataaggg

SEQ ID NO: 3353 - DNA, 20 bp, Artificial sequence
  Synthetic oligonucleotide
tcccaagtgatattataagg

SEQ ID NO: 3354 - DNA, 20 bp, Artificial sequence
  Synthetic oligonucleotide
gtcccaagtgatattataag

SEQ ID NO: 3355 - DNA, 20 bp, Artificial sequence
  Synthetic oligonucleotide
ggtcccaagtgatattataa

SEQ ID NO: 3356 - DNA, 20 bp, Artificial sequence
  Synthetic oligonucleotide
tggtcccaagtgatattata

SEQ ID NO: 3357 - DNA, 20 bp, Artificial sequence
  Synthetic oligonucleotide
ctggtcccaagtgatattat

SEQ ID NO: 3358 - DNA, 20 bp, Artificial sequence
  Synthetic oligonucleotide
cctggtcccaagtgatatta

SEQ ID NO: 3359 - DNA, 20 bp, Artificial sequence
  Synthetic oligonucleotide
tcctggtcccaagtgatatt

SEQ ID NO: 3360 - DNA, 20 bp, Artificial sequence
  Synthetic oligonucleotide
gtcctggtcccaagtgatat

SEQ ID NO: 3361 - DNA, 20 bp, Artificial sequence
  Synthetic oligonucleotide
agtcctggtcccaagtgata

SEQ ID NO: 3362 - DNA, 20 bp, Artificial sequence
  Synthetic oligonucleotide
cagtcctggtcccaagtgat

SEQ ID NO: 3363 - DNA, 20 bp, Artificial sequence
  Synthetic oligonucleotide
tcagtcctggtcccaagtga

SEQ ID NO: 3364 - DNA, 20 bp, Artificial sequence
  Synthetic oligonucleotide
atcagtcctggtcccaagtg

SEQ ID NO: 3365 - DNA, 20 bp, Artificial sequence
  Synthetic oligonucleotide
gatcagtcctggtcccaagt

SEQ ID NO: 3366 - DNA, 20 bp, Artificial sequence
  Synthetic oligonucleotide
acgatcagtcctggtcccaa

SEQ ID NO: 3367 - DNA, 20 bp, Artificial sequence
  Synthetic oligonucleotide
aacgatcagtcctggtccca

SEQ ID NO: 3368 - DNA, 20 bp, Artificial sequence
  Synthetic oligonucleotide
agaacgatcagtcctggtcc

SEQ ID NO: 3369 - DNA, 20 bp, Artificial sequence
  Synthetic oligonucleotide
cagaacgatcagtcctggtc

SEQ ID NO: 3370 - DNA, 20 bp, Artificial sequence
  Synthetic oligonucleotide
gcagaacgatcagtcctggt

SEQ ID NO: 3371 - DNA, 20 bp, Artificial sequence
  Synthetic oligonucleotide
tgcagaacgatcagtcctgg

SEQ ID NO: 3372 - DNA, 20 bp, Artificial sequence
  Synthetic oligonucleotide
ttgcagaacgatcagtcctg

SEQ ID NO: 3373 - DNA, 20 bp, Artificial sequence
  Synthetic oligonucleotide
tttgcagaacgatcagtcct

SEQ ID NO: 3374 - DNA, 20 bp, Artificial sequence
  Synthetic oligonucleotide
atttgcagaacgatcagtcc

SEQ ID NO: 3375 - DNA, 20 bp, Artificial sequence
  Synthetic oligonucleotide
catttgcagaacgatcagtc

SEQ ID NO: 3376 - DNA, 20 bp, Artificial sequence
  Synthetic oligonucleotide
atggcataacaagcatttgc

SEQ ID NO: 3377 - DNA, 20 bp, Artificial sequence
  Synthetic oligonucleotide
gaatggcataacaagcattt

SEQ ID NO: 3378 - DNA, 20 bp, Artificial sequence
  Synthetic oligonucleotide
agaatggcataacaagcatt

SEQ ID NO: 3379 - DNA, 20 bp, Artificial sequence
  Synthetic oligonucleotide
gagaatggcataacaagcat

SEQ ID NO: 3380 - DNA, 20 bp, Artificial sequence
  Synthetic oligonucleotide
tgagaatggcataacaagca

SEQ ID NO: 3381 - DNA, 20 bp, Artificial sequence
  Synthetic oligonucleotide
ttgagaatggcataacaagc

SEQ ID NO: 3382 - DNA, 20 bp, Artificial sequence
  Synthetic oligonucleotide
attgagaatggcataacaag

SEQ ID NO: 3383 - DNA, 20 bp, Artificial sequence
  Synthetic oligonucleotide
gattgagaatggcataacaa

SEQ ID NO: 3384 - DNA, 20 bp, Artificial sequence
  Synthetic oligonucleotide
agattgagaatggcataaca

SEQ ID NO: 3385 - DNA, 20 bp, Artificial sequence
  Synthetic oligonucleotide
tagattgagaatggcataac

SEQ ID NO: 3386 - DNA, 20 bp, Artificial sequence
  Synthetic oligonucleotide
atagattgagaatggcataa

SEQ ID NO: 3387 - DNA, 20 bp, Artificial sequence
  Synthetic oligonucleotide
aatagattgagaatggcata

SEQ ID NO: 3388 - DNA, 20 bp, Artificial sequence
  Synthetic oligonucleotide
aaatagattgagaatggcat

SEQ ID NO: 3389 - DNA, 20 bp, Artificial sequence
  Synthetic oligonucleotide
aaaatagattgagaatggca

SEQ ID NO: 3390 - DNA, 20 bp, Artificial sequence
  Synthetic oligonucleotide
aaaaatagattgagaatggc

SEQ ID NO: 3391 - DNA, 20 bp, Artificial sequence
  Synthetic oligonucleotide
gaaaaatagattgagaatgg

SEQ ID NO: 3392 - DNA, 20 bp, Artificial sequence
  Synthetic oligonucleotide
ggaaaaatagattgagaatg

SEQ ID NO: 3393 - DNA, 20 bp, Artificial sequence
  Synthetic oligonucleotide
gggaaaaatagattgagaat

SEQ ID NO: 3394 - DNA, 20 bp, Artificial sequence
  Synthetic oligonucleotide
cgggaaaaatagattgagaa

SEQ ID NO: 3395 - DNA, 20 bp, Artificial sequence
  Synthetic oligonucleotide
gcgggaaaaatagattgaga

SEQ ID NO: 3396 - DNA, 20 bp, Artificial sequence
  Synthetic oligonucleotide
tgcgggaaaaatagattgag

SEQ ID NO: 3397 - DNA, 20 bp, Artificial sequence
  Synthetic oligonucleotide
gtgcgggaaaaatagattga

SEQ ID NO: 3398 - DNA, 20 bp, Artificial sequence
  Synthetic oligonucleotide
ggtgcgggaaaaatagattg

SEQ ID NO: 3399 - DNA, 20 bp, Artificial sequence
  Synthetic oligonucleotide
aggtgcgggaaaaatagatt

SEQ ID NO: 3400 - DNA, 20 bp, Artificial sequence
  Synthetic oligonucleotide
aaggtgcgggaaaaatagat

SEQ ID NO: 3401 - DNA, 20 bp, Artificial sequence
  Synthetic oligonucleotide
aaaggtgcgggaaaaataga

SEQ ID NO: 3402 - DNA, 20 bp, Artificial sequence
  Synthetic oligonucleotide
aaaaggtgcgggaaaaatag

SEQ ID NO: 3403 - DNA, 20 bp, Artificial sequence
  Synthetic oligonucleotide
gaaaaggtgcgggaaaaata

SEQ ID NO: 3404 - DNA, 20 bp, Artificial sequence
  Synthetic oligonucleotide
tgaaaaggtgcgggaaaaat

SEQ ID NO: 3405 - DNA, 20 bp, Artificial sequence
  Synthetic oligonucleotide
gtgaaaaggtgcgggaaaaa

SEQ ID NO: 3406 - DNA, 20 bp, Artificial sequence
  Synthetic oligonucleotide
tgtgaaaaggtgcgggaaaa

SEQ ID NO: 3407 - DNA, 20 bp, Artificial sequence
  Synthetic oligonucleotide
atgtgaaaaggtgcgggaaa

SEQ ID NO: 3408 - DNA, 20 bp, Artificial sequence
  Synthetic oligonucleotide
catgtgaaaaggtgcgggaa

SEQ ID NO: 3409 - DNA, 20 bp, Artificial sequence
  Synthetic oligonucleotide
tcatgtgaaaaggtgcggga

SEQ ID NO: 3410 - DNA, 20 bp, Artificial sequence
  Synthetic oligonucleotide
atcatgtgaaaaggtgcggg

SEQ ID NO: 3411 - DNA, 20 bp, Artificial sequence
  Synthetic oligonucleotide
aatcatgtgaaaaggtgcgg

SEQ ID NO: 3412 - DNA, 20 bp, Artificial sequence
  Synthetic oligonucleotide
aaatcatgtgaaaaggtgcg

SEQ ID NO: 3413 - DNA, 20 bp, Artificial sequence
  Synthetic oligonucleotide
caaatcatgtgaaaaggtgc

SEQ ID NO: 3414 - DNA, 20 bp, Artificial sequence
  Synthetic oligonucleotide
cctattaaccacaaatcatg

SEQ ID NO: 3415 - DNA, 20 bp, Artificial sequence
  Synthetic oligonucleotide
tcctattaaccacaaatcat

SEQ ID NO: 3416 - DNA, 20 bp, Artificial sequence
  Synthetic oligonucleotide
gtcctattaaccacaaatca

SEQ ID NO: 3417 - DNA, 20 bp, Artificial sequence
  Synthetic oligonucleotide
agtcctattaaccacaaatc

SEQ ID NO: 3418 - DNA, 20 bp, Artificial sequence
  Synthetic oligonucleotide
gagtcctattaaccacaaat

SEQ ID NO: 3419 - DNA, 20 bp, Artificial sequence
  Synthetic oligonucleotide
tgagtcctattaaccacaaa

SEQ ID NO: 3420 - DNA, 20 bp, Artificial sequence
  Synthetic oligonucleotide
ttgagtcctattaaccacaa

SEQ ID NO: 3421 - DNA, 20 bp, Artificial sequence
  Synthetic oligonucleotide
gttgagtcctattaaccaca

SEQ ID NO: 3422 - DNA, 20 bp, Artificial sequence
  Synthetic oligonucleotide
tgttgagtcctattaaccac

SEQ ID NO: 3423 - DNA, 20 bp, Artificial sequence
  Synthetic oligonucleotide
ctgttgagtcctattaacca

SEQ ID NO: 3424 - DNA, 20 bp, Artificial sequence
  Synthetic oligonucleotide
tctgttgagtcctattaacc

SEQ ID NO: 3425 - DNA, 20 bp, Artificial sequence
  Synthetic oligonucleotide
gtctgttgagtcctattaac

SEQ ID NO: 3426 - DNA, 20 bp, Artificial sequence
  Synthetic oligonucleotide
agtctgttgagtcctattaa

SEQ ID NO: 3427 - DNA, 20 bp, Artificial sequence
  Synthetic oligonucleotide
tagtctgttgagtcctatta

SEQ ID NO: 3428 - DNA, 20 bp, Artificial sequence
  Synthetic oligonucleotide
ttagtctgttgagtcctatt

SEQ ID NO: 3429 - DNA, 20 bp, Artificial sequence
  Synthetic oligonucleotide
tttagtctgttgagtcctat

SEQ ID NO: 3430 - DNA, 20 bp, Artificial sequence
  Synthetic oligonucleotide
ttttagtctgttgagtccta

SEQ ID NO: 3431 - DNA, 20 bp, Artificial sequence
  Synthetic oligonucleotide
attttagtctgttgagtcct

SEQ ID NO: 3432 - DNA, 20 bp, Artificial sequence
  Synthetic oligonucleotide
aattttagtctgttgagtcc

SEQ ID NO: 3433 - DNA, 20 bp, Artificial sequence
  Synthetic oligonucleotide
caattttagtctgttgagtc

SEQ ID NO: 3434 - DNA, 20 bp, Artificial sequence
  Synthetic oligonucleotide
gcaattttagtctgttgagt

SEQ ID NO: 3435 - DNA, 20 bp, Artificial sequence
  Synthetic oligonucleotide
tgcaattttagtctgttgag

SEQ ID NO: 3436 - DNA, 20 bp, Artificial sequence
  Synthetic oligonucleotide
atgcaattttagtctgttga

SEQ ID NO: 3437 - DNA, 20 bp, Artificial sequence
  Synthetic oligonucleotide
tatgcaattttagtctgttg

SEQ ID NO: 3438 - DNA, 20 bp, Artificial sequence
  Synthetic oligonucleotide
ctatgcaattttagtctgtt

SEQ ID NO: 3439 - DNA, 20 bp, Artificial sequence
  Synthetic oligonucleotide
actatgcaattttagtctgt

SEQ ID NO: 3440 - DNA, 20 bp, Artificial sequence
  Synthetic oligonucleotide
tactatgcaattttagtctg

SEQ ID NO: 3441 - DNA, 20 bp, Artificial sequence
  Synthetic oligonucleotide
ctactatgcaattttagtct

SEQ ID NO: 3442 - DNA, 20 bp, Artificial sequence
  Synthetic oligonucleotide
tctactatgcaattttagtc

SEQ ID NO: 3443 - DNA, 20 bp, Artificial sequence
  Synthetic oligonucleotide
ttctactatgcaattttagt

SEQ ID NO: 3444 - DNA, 20 bp, Artificial sequence
  Synthetic oligonucleotide
tttctactatgcaattttag

SEQ ID NO: 3445 - DNA, 20 bp, Artificial sequence
  Synthetic oligonucleotide
gcaataaacattaccagctg

SEQ ID NO: 3446 - DNA, 20 bp, Artificial sequence
  Synthetic oligonucleotide
tgcaataaacattaccagct

SEQ ID NO: 3447 - DNA, 20 bp, Artificial sequence
  Synthetic oligonucleotide
ttgcaataaacattaccagc

SEQ ID NO: 3448 - DNA, 20 bp, Artificial sequence
  Synthetic oligonucleotide
gttgcaataaacattaccag

SEQ ID NO: 3449 - DNA, 20 bp, Artificial sequence
  Synthetic oligonucleotide
agttgcaataaacattacca

SEQ ID NO: 3450 - DNA, 20 bp, Artificial sequence
  Synthetic oligonucleotide
cagttgcaataaacattacc

SEQ ID NO: 3451 - DNA, 20 bp, Artificial sequence
  Synthetic oligonucleotide
ccagttgcaataaacattac

SEQ ID NO: 3452 - DNA, 20 bp, Artificial sequence
  Synthetic oligonucleotide
cccagttgcaataaacatta

SEQ ID NO: 3453 - DNA, 20 bp, Artificial sequence
  Synthetic oligonucleotide
ccccagttgcaataaacatt

SEQ ID NO: 3454 - DNA, 20 bp, Artificial sequence
  Synthetic oligonucleotide
accccagttgcaataaacat

SEQ ID NO: 3455 - DNA, 20 bp, Artificial sequence
  Synthetic oligonucleotide
caccccagttgcaataaaca

SEQ ID NO: 3456 - DNA, 20 bp, Artificial sequence
  Synthetic oligonucleotide
gcaccccagttgcaataaac

SEQ ID NO: 3457 - DNA, 20 bp, Artificial sequence
  Synthetic oligonucleotide
agcaccccagttgcaataaa

SEQ ID NO: 3458 - DNA, 20 bp, Artificial sequence
  Synthetic oligonucleotide
tagcaccccagttgcaataa

SEQ ID NO: 3459 - DNA, 20 bp, Artificial sequence
  Synthetic oligonucleotide
atagcaccccagttgcaata

SEQ ID NO: 3460 - DNA, 20 bp, Artificial sequence
  Synthetic oligonucleotide
tatagcaccccagttgcaat

SEQ ID NO: 3461 - DNA, 20 bp, Artificial sequence
  Synthetic oligonucleotide
gtatagcaccccagttgcaa

SEQ ID NO: 3462 - DNA, 20 bp, Artificial sequence
  Synthetic oligonucleotide
tgtatagcaccccagttgca

SEQ ID NO: 3463 - DNA, 20 bp, Artificial sequence
  Synthetic oligonucleotide
ttgtatagcaccccagttgc

SEQ ID NO: 3464 - DNA, 20 bp, Artificial sequence
  Synthetic oligonucleotide
attgtatagcaccccagttg

SEQ ID NO: 3465 - DNA, 20 bp, Artificial sequence
  Synthetic oligonucleotide
aattgtatagcaccccagtt

SEQ ID NO: 3466 - DNA, 20 bp, Artificial sequence
  Synthetic oligonucleotide
taattgtatagcaccccagt

SEQ ID NO: 3467 - DNA, 20 bp, Artificial sequence
  Synthetic oligonucleotide
ctaattgtatagcaccccag

SEQ ID NO: 3468 - DNA, 20 bp, Artificial sequence
  Synthetic oligonucleotide
actaattgtatagcacccca

SEQ ID NO: 3469 - DNA, 20 bp, Artificial sequence
  Synthetic oligonucleotide
tactaattgtatagcacccc

SEQ ID NO: 3470 - DNA, 20 bp, Artificial sequence
  Synthetic oligonucleotide
ttactaattgtatagcaccc

SEQ ID NO: 3471 - DNA, 20 bp, Artificial sequence
  Synthetic oligonucleotide
cttactaattgtatagcacc

SEQ ID NO: 3472 - DNA, 20 bp, Artificial sequence
  Synthetic oligonucleotide
tcttactaattgtatagcac

SEQ ID NO: 3473 - DNA, 20 bp, Artificial sequence
  Synthetic oligonucleotide
atcttactaattgtatagca

SEQ ID NO: 3474 - DNA, 20 bp, Artificial sequence
  Synthetic oligonucleotide
catcttactaattgtatagc

SEQ ID NO: 3475 - DNA, 20 bp, Artificial sequence
  Synthetic oligonucleotide
tcatcttactaattgtatag

SEQ ID NO: 3476 - DNA, 20 bp, Artificial sequence
  Synthetic oligonucleotide
catcatcttactaattgtat

SEQ ID NO: 3477 - DNA, 20 bp, Artificial sequence
  Synthetic oligonucleotide
gcatcatcttactaattgta

SEQ ID NO: 3478 - DNA, 20 bp, Artificial sequence
  Synthetic oligonucleotide
tgcatcatcttactaattgt

SEQ ID NO: 3479 - DNA, 20 bp, Artificial sequence
  Synthetic oligonucleotide
ttgcatcatcttactaattg

SEQ ID NO: 3480 - DNA, 20 bp, Artificial sequence
  Synthetic oligonucleotide
attgcatcatcttactaatt

SEQ ID NO: 3481 - DNA, 20 bp, Artificial sequence
  Synthetic oligonucleotide
cattgcatcatcttactaat

SEQ ID NO: 3482 - DNA, 20 bp, Artificial sequence
  Synthetic oligonucleotide
tcattgcatcatcttactaa

SEQ ID NO: 3483 - DNA, 20 bp, Artificial sequence
  Synthetic oligonucleotide
ctcattgcatcatcttacta

SEQ ID NO: 3484 - DNA, 20 bp, Artificial sequence
  Synthetic oligonucleotide
tctcattgcatcatcttact

SEQ ID NO: 3485 - DNA, 20 bp, Artificial sequence
  Synthetic oligonucleotide
ttctcattgcatcatcttac

SEQ ID NO: 3486 - DNA, 20 bp, Artificial sequence
  Synthetic oligonucleotide
attctcattgcatcatctta

SEQ ID NO: 3487 - DNA, 20 bp, Artificial sequence
  Synthetic oligonucleotide
aattctcattgcatcatctt

SEQ ID NO: 3488 - DNA, 20 bp, Artificial sequence
  Synthetic oligonucleotide
aaattctcattgcatcatct

SEQ ID NO: 3489 - DNA, 20 bp, Artificial sequence
  Synthetic oligonucleotide
gaaattctcattgcatcatc

SEQ ID NO: 3490 - DNA, 20 bp, Artificial sequence
  Synthetic oligonucleotide
agaaattctcattgcatcat

SEQ ID NO: 3491 - DNA, 20 bp, Artificial sequence
  Synthetic oligonucleotide
tagaaattctcattgcatca

SEQ ID NO: 3492 - DNA, 20 bp, Artificial sequence
  Synthetic oligonucleotide
gtagaaattctcattgcatc

SEQ ID NO: 3493 - DNA, 20 bp, Artificial sequence
  Synthetic oligonucleotide
agtagaaattctcattgcat

SEQ ID NO: 3494 - DNA, 20 bp, Artificial sequence
  Synthetic oligonucleotide
aagtagaaattctcattgca

SEQ ID NO: 3495 - DNA, 20 bp, Artificial sequence
  Synthetic oligonucleotide
aaagtagaaattctcattgc

SEQ ID NO: 3496 - DNA, 20 bp, Artificial sequence
  Synthetic oligonucleotide
aaaagtagaaattctcattg

SEQ ID NO: 3497 - DNA, 20 bp, Artificial sequence
  Synthetic oligonucleotide
caaaagtagaaattctcatt

SEQ ID NO: 3498 - DNA, 20 bp, Artificial sequence
  Synthetic oligonucleotide
acaaaagtagaaattctcat

SEQ ID NO: 3499 - DNA, 20 bp, Artificial sequence
  Synthetic oligonucleotide
tacaaaagtagaaattctca

SEQ ID NO: 3500 - DNA, 20 bp, Artificial sequence
  Synthetic oligonucleotide
atacaaaagtagaaattctc

SEQ ID NO: 3501 - DNA, 20 bp, Artificial sequence
  Synthetic oligonucleotide
ggaaatacaaaagtagaaat

SEQ ID NO: 3502 - DNA, 20 bp, Artificial sequence
  Synthetic oligonucleotide
aggaaatacaaaagtagaaa

SEQ ID NO: 3503 - DNA, 20 bp, Artificial sequence
  Synthetic oligonucleotide
caggaaatacaaaagtagaa

SEQ ID NO: 3504 - DNA, 20 bp, Artificial sequence
  Synthetic oligonucleotide
tcaggaaatacaaaagtaga

SEQ ID NO: 3505 - DNA, 20 bp, Artificial sequence
  Synthetic oligonucleotide
gtcaggaaatacaaaagtag

SEQ ID NO: 3506 - DNA, 20 bp, Artificial sequence
  Synthetic oligonucleotide
ggtcaggaaatacaaaagta

SEQ ID NO: 3507 - DNA, 20 bp, Artificial sequence
  Synthetic oligonucleotide
tggtcaggaaatacaaaagt

SEQ ID NO: 3508 - DNA, 20 bp, Artificial sequence
  Synthetic oligonucleotide
ctggtcaggaaatacaaaag

SEQ ID NO: 3509 - DNA, 20 bp, Artificial sequence
  Synthetic oligonucleotide
gctggtcaggaaatacaaaa

SEQ ID NO: 3510 - DNA, 20 bp, Artificial sequence
  Synthetic oligonucleotide
ggctggtcaggaaatacaaa

SEQ ID NO: 3511 - DNA, 20 bp, Artificial sequence
  Synthetic oligonucleotide
aggctggtcaggaaatacaa

SEQ ID NO: 3512 - DNA, 20 bp, Artificial sequence
  Synthetic oligonucleotide
caggctggtcaggaaataca

SEQ ID NO: 3513 - DNA, 20 bp, Artificial sequence
  Synthetic oligonucleotide
gcaggctggtcaggaaatac

SEQ ID NO: 3514 - DNA, 20 bp, Artificial sequence
  Synthetic oligonucleotide
agcaggctggtcaggaaata

SEQ ID NO: 3515 - DNA, 20 bp, Artificial sequence
  Synthetic oligonucleotide
taaaagccactttgagcagg

SEQ ID NO: 3516 - DNA, 20 bp, Artificial sequence
  Synthetic oligonucleotide
ataaaagccactttgagcag

SEQ ID NO: 3517 - DNA, 20 bp, Artificial sequence
  Synthetic oligonucleotide
tataaaagccactttgagca

SEQ ID NO: 3518 - DNA, 20 bp, Artificial sequence
  Synthetic oligonucleotide
atataaaagccactttgagc

SEQ ID NO: 3519 - DNA, 20 bp, Artificial sequence
  Synthetic oligonucleotide
gatataaaagccactttgag

SEQ ID NO: 3520 - DNA, 20 bp, Artificial sequence
  Synthetic oligonucleotide
tgatataaaagccactttga

SEQ ID NO: 3521 - DNA, 20 bp, Artificial sequence
  Synthetic oligonucleotide
ttgatataaaagccactttg

SEQ ID NO: 3522 - DNA, 20 bp, Artificial sequence
  Synthetic oligonucleotide
attgatataaaagccacttt

SEQ ID NO: 3523 - DNA, 20 bp, Artificial sequence
  Synthetic oligonucleotide
aattgatataaaagccactt

SEQ ID NO: 3524 - DNA, 20 bp, Artificial sequence
  Synthetic oligonucleotide
caattgatataaaagccact

SEQ ID NO: 3525 - DNA, 20 bp, Artificial sequence
  Synthetic oligonucleotide
tcaattgatataaaagccac

SEQ ID NO: 3526 - DNA, 20 bp, Artificial sequence
  Synthetic oligonucleotide
ttcaattgatataaaagcca

SEQ ID NO: 3527 - DNA, 20 bp, Artificial sequence
  Synthetic oligonucleotide
attcaattgatataaaagcc

SEQ ID NO: 3528 - DNA, 20 bp, Artificial sequence
  Synthetic oligonucleotide
cattcaattgatataaaagc

SEQ ID NO: 3529 - DNA, 20 bp, Artificial sequence
  Synthetic oligonucleotide
ggaaaatcattcaattgata

SEQ ID NO: 3530 - DNA, 20 bp, Artificial sequence
  Synthetic oligonucleotide
aggaaaatcattcaattgat

SEQ ID NO: 3531 - DNA, 20 bp, Artificial sequence
  Synthetic oligonucleotide
gaggaaaatcattcaattga

SEQ ID NO: 3532 - DNA, 20 bp, Artificial sequence
  Synthetic oligonucleotide
tgaggaaaatcattcaattg

SEQ ID NO: 3533 - DNA, 20 bp, Artificial sequence
  Synthetic oligonucleotide
atgaggaaaatcattcaatt

SEQ ID NO: 3534 - DNA, 20 bp, Artificial sequence
  Synthetic oligonucleotide
ttggtttcctgtattaaaaa

SEQ ID NO: 3535 - DNA, 20 bp, Artificial sequence
  Synthetic oligonucleotide
attggtttcctgtattaaaa

SEQ ID NO: 3536 - DNA, 20 bp, Artificial sequence
  Synthetic oligonucleotide
aattggtttcctgtattaaa

SEQ ID NO: 3537 - DNA, 20 bp, Artificial sequence
  Synthetic oligonucleotide
gaattggtttcctgtattaa

SEQ ID NO: 3538 - DNA, 20 bp, Artificial sequence
  Synthetic oligonucleotide
cgaattggtttcctgtatta

SEQ ID NO: 3539 - DNA, 20 bp, Artificial sequence
  Synthetic oligonucleotide
acgaattggtttcctgtatt

SEQ ID NO: 3540 - DNA, 20 bp, Artificial sequence
  Synthetic oligonucleotide
cacgaattggtttcctgtat

SEQ ID NO: 3541 - DNA, 20 bp, Artificial sequence
  Synthetic oligonucleotide
gcacgaattggtttcctgta

SEQ ID NO: 3542 - DNA, 20 bp, Artificial sequence
  Synthetic oligonucleotide
agcacgaattggtttcctgt

SEQ ID NO: 3543 - DNA, 20 bp, Artificial sequence
  Synthetic oligonucleotide
gagcacgaattggtttcctg

SEQ ID NO: 3544 - DNA, 20 bp, Artificial sequence
  Synthetic oligonucleotide
tgagcacgaattggtttcct

SEQ ID NO: 3545 - DNA, 20 bp, Artificial sequence
  Synthetic oligonucleotide
atgagcacgaattggtttcc

SEQ ID NO: 3546 - DNA, 20 bp, Artificial sequence
  Synthetic oligonucleotide
catgagcacgaattggtttc

SEQ ID NO: 3547 - DNA, 20 bp, Artificial sequence
  Synthetic oligonucleotide
ccatgagcacgaattggttt

SEQ ID NO: 3548 - DNA, 20 bp, Artificial sequence
  Synthetic oligonucleotide
tccatgagcacgaattggtt

SEQ ID NO: 3549 - DNA, 20 bp, Artificial sequence
  Synthetic oligonucleotide
cttccatgagcacgaattgg

SEQ ID NO: 3550 - DNA, 20 bp, Artificial sequence
  Synthetic oligonucleotide
tcttccatgagcacgaattg

SEQ ID NO: 3551 - DNA, 20 bp, Artificial sequence
  Synthetic oligonucleotide
ttcttccatgagcacgaatt

SEQ ID NO: 3552 - DNA, 20 bp, Artificial sequence
  Synthetic oligonucleotide
tttcttccatgagcacgaat

SEQ ID NO: 3553 - DNA, 20 bp, Artificial sequence
  Synthetic oligonucleotide
ttttcttccatgagcacgaa

SEQ ID NO: 3554 - DNA, 20 bp, Artificial sequence
  Synthetic oligonucleotide
cttttcttccatgagcacga

SEQ ID NO: 3555 - DNA, 20 bp, Artificial sequence
  Synthetic oligonucleotide
acttttcttccatgagcacg

SEQ ID NO: 3556 - DNA, 20 bp, Artificial sequence
  Synthetic oligonucleotide
aacttttcttccatgagcac

SEQ ID NO: 3557 - DNA, 20 bp, Artificial sequence
  Synthetic oligonucleotide
gaacttttcttccatgagca

SEQ ID NO: 3558 - DNA, 20 bp, Artificial sequence
  Synthetic oligonucleotide
attcacttcaaggctgctgg

SEQ ID NO: 3559 - DNA, 20 bp, Artificial sequence
  Synthetic oligonucleotide
gattcacttcaaggctgctg

SEQ ID NO: 3560 - DNA, 20 bp, Artificial sequence
  Synthetic oligonucleotide
agattcacttcaaggctgct

SEQ ID NO: 3561 - DNA, 20 bp, Artificial sequence
  Synthetic oligonucleotide
aagattcacttcaaggctgc

SEQ ID NO: 3562 - DNA, 20 bp, Artificial sequence
  Synthetic oligonucleotide
ttgctcctgtaagattcact

SEQ ID NO: 3563 - DNA, 20 bp, Artificial sequence
  Synthetic oligonucleotide
attgctcctgtaagattcac

SEQ ID NO: 3564 - DNA, 20 bp, Artificial sequence
  Synthetic oligonucleotide
cattgctcctgtaagattca

SEQ ID NO: 3565 - DNA, 20 bp, Artificial sequence
  Synthetic oligonucleotide
tcattgctcctgtaagattc

SEQ ID NO: 3566 - DNA, 20 bp, Artificial sequence
  Synthetic oligonucleotide
ttcattgctcctgtaagatt

SEQ ID NO: 3567 - DNA, 20 bp, Artificial sequence
  Synthetic oligonucleotide
tttcattgctcctgtaagat

SEQ ID NO: 3568 - DNA, 20 bp, Artificial sequence
  Synthetic oligonucleotide
ctttcattgctcctgtaaga

SEQ ID NO: 3569 - DNA, 20 bp, Artificial sequence
  Synthetic oligonucleotide
actttcattgctcctgtaag

SEQ ID NO: 3570 - DNA, 20 bp, Artificial sequence
  Synthetic oligonucleotide
tactttcattgctcctgtaa

SEQ ID NO: 3571 - DNA, 20 bp, Artificial sequence
  Synthetic oligonucleotide
atactttcattgctcctgta

SEQ ID NO: 3572 - DNA, 20 bp, Artificial sequence
  Synthetic oligonucleotide
aatactttcattgctcctgt

SEQ ID NO: 3573 - DNA, 20 bp, Artificial sequence
  Synthetic oligonucleotide
caatactttcattgctcctg

SEQ ID NO: 3574 - DNA, 20 bp, Artificial sequence
  Synthetic oligonucleotide
tgaatgcaatactttcattg

SEQ ID NO: 3575 - DNA, 20 bp, Artificial sequence
  Synthetic oligonucleotide
ctaatgaatgcaatactttc

SEQ ID NO: 3576 - DNA, 20 bp, Artificial sequence
  Synthetic oligonucleotide
gctaatgaatgcaatacttt

SEQ ID NO: 3577 - DNA, 20 bp, Artificial sequence
  Synthetic oligonucleotide
cgctaatgaatgcaatactt

SEQ ID NO: 3578 - DNA, 20 bp, Artificial sequence
  Synthetic oligonucleotide
acgctaatgaatgcaatact

SEQ ID NO: 3579 - DNA, 20 bp, Artificial sequence
  Synthetic oligonucleotide
gacgctaatgaatgcaatac

SEQ ID NO: 3580 - DNA, 20 bp, Artificial sequence
  Synthetic oligonucleotide
agacgctaatgaatgcaata

SEQ ID NO: 3581 - DNA, 20 bp, Artificial sequence
  Synthetic oligonucleotide
cagacgctaatgaatgcaat

SEQ ID NO: 3582 - DNA, 20 bp, Artificial sequence
  Synthetic oligonucleotide
gcagacgctaatgaatgcaa

SEQ ID NO: 3583 - DNA, 20 bp, Artificial sequence
  Synthetic oligonucleotide
ttctctgaaccttctctggg

SEQ ID NO: 3584 - DNA, 20 bp, Artificial sequence
  Synthetic oligonucleotide
tttctctgaaccttctctgg

SEQ ID NO: 3585 - DNA, 20 bp, Artificial sequence
  Synthetic oligonucleotide
ttttctctgaaccttctctg

SEQ ID NO: 3586 - DNA, 20 bp, Artificial sequence
  Synthetic oligonucleotide
gttttctctgaaccttctct

SEQ ID NO: 3587 - DNA, 20 bp, Artificial sequence
  Synthetic oligonucleotide
agtgaaggttttctctgaac

SEQ ID NO: 3588 - DNA, 20 bp, Artificial sequence
  Synthetic oligonucleotide
aagtgaaggttttctctgaa

SEQ ID NO: 3589 - DNA, 20 bp, Artificial sequence
  Synthetic oligonucleotide
caagtgaaggttttctctga

SEQ ID NO: 3590 - DNA, 20 bp, Artificial sequence
  Synthetic oligonucleotide
acaagtgaaggttttctctg

SEQ ID NO: 3591 - DNA, 20 bp, Artificial sequence
  Synthetic oligonucleotide
aacaagtgaaggttttctct

SEQ ID NO: 3592 - DNA, 20 bp, Artificial sequence
  Synthetic oligonucleotide
aaacaagtgaaggttttctc

SEQ ID NO: 3593 - DNA, 20 bp, Artificial sequence
  Synthetic oligonucleotide
cttgaaaacaagtgaaggtt

SEQ ID NO: 3594 - DNA, 20 bp, Artificial sequence
  Synthetic oligonucleotide
ccttgaaaacaagtgaaggt

SEQ ID NO: 3595 - DNA, 20 bp, Artificial sequence
  Synthetic oligonucleotide
cccttgaaaacaagtgaagg

SEQ ID NO: 3596 - DNA, 20 bp, Artificial sequence
  Synthetic oligonucleotide
ccccttgaaaacaagtgaag

SEQ ID NO: 3597 - DNA, 20 bp, Artificial sequence
  Synthetic oligonucleotide
tccccttgaaaacaagtgaa

SEQ ID NO: 3598 - DNA, 20 bp, Artificial sequence
  Synthetic oligonucleotide
atccccttgaaaacaagtga

SEQ ID NO: 3599 - DNA, 20 bp, Artificial sequence
  Synthetic oligonucleotide
gatccccttgaaaacaagtg

SEQ ID NO: 3600 - DNA, 20 bp, Artificial sequence
  Synthetic oligonucleotide
ggatccccttgaaaacaagt

SEQ ID NO: 3601 - DNA, 20 bp, Artificial sequence
  Synthetic oligonucleotide
gtaaatctacaaggatcccc

SEQ ID NO: 3602 - DNA, 20 bp, Artificial sequence
  Synthetic oligonucleotide
cgtaaatctacaaggatccc

SEQ ID NO: 3603 - DNA, 20 bp, Artificial sequence
  Synthetic oligonucleotide
acgtaaatctacaaggatcc

SEQ ID NO: 3604 - DNA, 20 bp, Artificial sequence
  Synthetic oligonucleotide
tacgtaaatctacaaggatc

SEQ ID NO: 3605 - DNA, 20 bp, Artificial sequence
  Synthetic oligonucleotide
ttacgtaaatctacaaggat

SEQ ID NO: 3606 - DNA, 20 bp, Artificial sequence
  Synthetic oligonucleotide
attacgtaaatctacaagga

SEQ ID NO: 3607 - DNA, 20 bp, Artificial sequence
  Synthetic oligonucleotide
aattacgtaaatctacaagg

SEQ ID NO: 3608 - DNA, 20 bp, Artificial sequence
  Synthetic oligonucleotide
caattacgtaaatctacaag

SEQ ID NO: 3609 - DNA, 20 bp, Artificial sequence
  Synthetic oligonucleotide
ccaattacgtaaatctacaa

SEQ ID NO: 3610 - DNA, 20 bp, Artificial sequence
  Synthetic oligonucleotide
tccaattacgtaaatctaca

SEQ ID NO: 3611 - DNA, 20 bp, Artificial sequence
  Synthetic oligonucleotide
ttccaattacgtaaatctac

SEQ ID NO: 3612 - DNA, 20 bp, Artificial sequence
  Synthetic oligonucleotide
attccaattacgtaaatcta

SEQ ID NO: 3613 - DNA, 20 bp, Artificial sequence
  Synthetic oligonucleotide
gattccaattacgtaaatct

SEQ ID NO: 3614 - DNA, 20 bp, Artificial sequence
  Synthetic oligonucleotide
ggattccaattacgtaaatc

SEQ ID NO: 3615 - DNA, 20 bp, Artificial sequence
  Synthetic oligonucleotide
aggattccaattacgtaaat

SEQ ID NO: 3616 - DNA, 20 bp, Artificial sequence
  Synthetic oligonucleotide
caggattccaattacgtaaa

SEQ ID NO: 3617 - DNA, 20 bp, Artificial sequence
  Synthetic oligonucleotide
tcaggattccaattacgtaa

SEQ ID NO: 3618 - DNA, 20 bp, Artificial sequence
  Synthetic oligonucleotide
ttcaggattccaattacgta

SEQ ID NO: 3619 - DNA, 20 bp, Artificial sequence
  Synthetic oligonucleotide
cttcaggattccaattacgt

SEQ ID NO: 3620 - DNA, 20 bp, Artificial sequence
  Synthetic oligonucleotide
tcttcaggattccaattacg

SEQ ID NO: 3621 - DNA, 20 bp, Artificial sequence
  Synthetic oligonucleotide
ttcttcaggattccaattac

SEQ ID NO: 3622 - DNA, 20 bp, Artificial sequence
  Synthetic oligonucleotide
gttcttcaggattccaatta

SEQ ID NO: 3623 - DNA, 20 bp, Artificial sequence
  Synthetic oligonucleotide
tgttcttcaggattccaatt

SEQ ID NO: 3624 - DNA, 20 bp, Artificial sequence
  Synthetic oligonucleotide
tagaagaataaaagccattt

SEQ ID NO: 3625 - DNA, 20 bp, Artificial sequence
  Synthetic oligonucleotide
ttagaagaataaaagccatt

SEQ ID NO: 3626 - DNA, 20 bp, Artificial sequence
  Synthetic oligonucleotide
tttagaagaataaaagccat

SEQ ID NO: 3627 - DNA, 20 bp, Artificial sequence
  Synthetic oligonucleotide
atttagaagaataaaagcca

SEQ ID NO: 3628 - DNA, 20 bp, Artificial sequence
  Synthetic oligonucleotide
tatttagaagaataaaagcc

SEQ ID NO: 3629 - DNA, 20 bp, Artificial sequence
  Synthetic oligonucleotide
gtatttagaagaataaaagc

SEQ ID NO: 3630 - DNA, 20 bp, Artificial sequence
  Synthetic oligonucleotide
cgtttatatgtatttagaag

SEQ ID NO: 3631 - DNA, 20 bp, Artificial sequence
  Synthetic oligonucleotide
ccgtttatatgtatttagaa

SEQ ID NO: 3632 - DNA, 20 bp, Artificial sequence
  Synthetic oligonucleotide
tccgtttatatgtatttaga

SEQ ID NO: 3633 - DNA, 20 bp, Artificial sequence
  Synthetic oligonucleotide
atccgtttatatgtatttag

SEQ ID NO: 3634 - DNA, 20 bp, Artificial sequence
  Synthetic oligonucleotide
catccgtttatatgtattta

SEQ ID NO: 3635 - DNA, 20 bp, Artificial sequence
  Synthetic oligonucleotide
acatccgtttatatgtattt

SEQ ID NO: 3636 - DNA, 20 bp, Artificial sequence
  Synthetic oligonucleotide
aacatccgtttatatgtatt

SEQ ID NO: 3637 - DNA, 20 bp, Artificial sequence
  Synthetic oligonucleotide
ccatctataaaacatccgtt

SEQ ID NO: 3638 - DNA, 20 bp, Artificial sequence
  Synthetic oligonucleotide
cccatctataaaacatccgt

SEQ ID NO: 3639 - DNA, 20 bp, Artificial sequence
  Synthetic oligonucleotide
tcccatctataaaacatccg

SEQ ID NO: 3640 - DNA, 20 bp, Artificial sequence
  Synthetic oligonucleotide
ttcccatctataaaacatcc

SEQ ID NO: 3641 - DNA, 20 bp, Artificial sequence
  Synthetic oligonucleotide
cttcccatctataaaacatc

SEQ ID NO: 3642 - DNA, 20 bp, Artificial sequence
  Synthetic oligonucleotide
tcttcccatctataaaacat

SEQ ID NO: 3643 - DNA, 20 bp, Artificial sequence
  Synthetic oligonucleotide
gtcttcccatctataaaaca

SEQ ID NO: 3644 - DNA, 20 bp, Artificial sequence
  Synthetic oligonucleotide
tgtcttcccatctataaaac

SEQ ID NO: 3645 - DNA, 20 bp, Artificial sequence
  Synthetic oligonucleotide
atgtcttcccatctataaaa

SEQ ID NO: 3646 - DNA, 20 bp, Artificial sequence
  Synthetic oligonucleotide
catgtcttcccatctataaa

SEQ ID NO: 3647 - DNA, 20 bp, Artificial sequence
  Synthetic oligonucleotide
tcatgtcttcccatctataa

SEQ ID NO: 3648 - DNA, 20 bp, Artificial sequence
  Synthetic oligonucleotide
gtcatgtcttcccatctata

SEQ ID NO: 3649 - DNA, 20 bp, Artificial sequence
  Synthetic oligonucleotide
ggtcatgtcttcccatctat

SEQ ID NO: 3650 - DNA, 20 bp, Artificial sequence
  Synthetic oligonucleotide
aggtcatgtcttcccatcta

SEQ ID NO: 3651 - DNA, 20 bp, Artificial sequence
  Synthetic oligonucleotide
aaggtcatgtcttcccatct

SEQ ID NO: 3652 - DNA, 20 bp, Artificial sequence
  Synthetic oligonucleotide
taaggtcatgtcttcccatc

SEQ ID NO: 3653 - DNA, 20 bp, Artificial sequence
  Synthetic oligonucleotide
ctaaggtcatgtcttcccat

SEQ ID NO: 3654 - DNA, 20 bp, Artificial sequence
  Synthetic oligonucleotide
tctaaggtcatgtcttccca

SEQ ID NO: 3655 - DNA, 20 bp, Artificial sequence
  Synthetic oligonucleotide
ttctaaggtcatgtcttccc

SEQ ID NO: 3656 - DNA, 20 bp, Artificial sequence
  Synthetic oligonucleotide
tttctaaggtcatgtcttcc

SEQ ID NO: 3657 - DNA, 20 bp, Artificial sequence
  Synthetic oligonucleotide
ctttctaaggtcatgtcttc

SEQ ID NO: 3658 - DNA, 20 bp, Artificial sequence
  Synthetic oligonucleotide
aaaactctctcctttctaag

SEQ ID NO: 3659 - DNA, 20 bp, Artificial sequence
  Synthetic oligonucleotide
gaaaactctctcctttctaa

SEQ ID NO: 3660 - DNA, 20 bp, Artificial sequence
  Synthetic oligonucleotide
tgaaaactctctcctttcta

SEQ ID NO: 3661 - DNA, 20 bp, Artificial sequence
  Synthetic oligonucleotide
ctgaaaactctctcctttct

SEQ ID NO: 3662 - DNA, 20 bp, Artificial sequence
  Synthetic oligonucleotide
tctgaaaactctctcctttc

SEQ ID NO: 3663 - DNA, 20 bp, Artificial sequence
  Synthetic oligonucleotide
ctctgaaaactctctccttt

SEQ ID NO: 3664 - DNA, 20 bp, Artificial sequence
  Synthetic oligonucleotide
cctctgaaaactctctcctt

SEQ ID NO: 3665 - DNA, 20 bp, Artificial sequence
  Synthetic oligonucleotide
tcctctgaaaactctctcct

SEQ ID NO: 3666 - DNA, 20 bp, Artificial sequence
  Synthetic oligonucleotide
atcctctgaaaactctctcc

SEQ ID NO: 3667 - DNA, 20 bp, Artificial sequence
  Synthetic oligonucleotide
aatcctctgaaaactctctc

SEQ ID NO: 3668 - DNA, 20 bp, Artificial sequence
  Synthetic oligonucleotide
aaatcctctgaaaactctct

SEQ ID NO: 3669 - DNA, 20 bp, Artificial sequence
  Synthetic oligonucleotide
caaatcctctgaaaactctc

SEQ ID NO: 3670 - DNA, 20 bp, Artificial sequence
  Synthetic oligonucleotide
gcaaatcctctgaaaactct

SEQ ID NO: 3671 - DNA, 20 bp, Artificial sequence
  Synthetic oligonucleotide
ggcaaatcctctgaaaactc

SEQ ID NO: 3672 - DNA, 20 bp, Artificial sequence
  Synthetic oligonucleotide
tggcaaatcctctgaaaact

SEQ ID NO: 3673 - DNA, 20 bp, Artificial sequence
  Synthetic oligonucleotide
ctggcaaatcctctgaaaac

SEQ ID NO: 3674 - DNA, 20 bp, Artificial sequence
  Synthetic oligonucleotide
cctggcaaatcctctgaaaa

SEQ ID NO: 3675 - DNA, 20 bp, Artificial sequence
  Synthetic oligonucleotide
gcctggcaaatcctctgaaa

SEQ ID NO: 3676 - DNA, 20 bp, Artificial sequence
  Synthetic oligonucleotide
agcctggcaaatcctctgaa

SEQ ID NO: 3677 - DNA, 20 bp, Artificial sequence
  Synthetic oligonucleotide
cagcctggcaaatcctctga

SEQ ID NO: 3678 - DNA, 20 bp, Artificial sequence
  Synthetic oligonucleotide
acagcctggcaaatcctctg

SEQ ID NO: 3679 - DNA, 20 bp, Artificial sequence
  Synthetic oligonucleotide
gacagcctggcaaatcctct

SEQ ID NO: 3680 - DNA, 20 bp, Artificial sequence
  Synthetic oligonucleotide
tgacagcctggcaaatcctc

SEQ ID NO: 3681 - DNA, 20 bp, Artificial sequence
  Synthetic oligonucleotide
ctgacagcctggcaaatcct

SEQ ID NO: 3682 - DNA, 20 bp, Artificial sequence
  Synthetic oligonucleotide
ttacaactcccaggacagtt

SEQ ID NO: 3683 - DNA, 20 bp, Artificial sequence
  Synthetic oligonucleotide
tttacaactcccaggacagt

SEQ ID NO: 3684 - DNA, 20 bp, Artificial sequence
  Synthetic oligonucleotide
ttttacaactcccaggacag

SEQ ID NO: 3685 - DNA, 20 bp, Artificial sequence
  Synthetic oligonucleotide
tttttacaactcccaggaca

SEQ ID NO: 3686 - DNA, 20 bp, Artificial sequence
  Synthetic oligonucleotide
atttttacaactcccaggac

SEQ ID NO: 3687 - DNA, 20 bp, Artificial sequence
  Synthetic oligonucleotide
gatttttacaactcccagga

SEQ ID NO: 3688 - DNA, 20 bp, Artificial sequence
  Synthetic oligonucleotide
agatttttacaactcccagg

SEQ ID NO: 3689 - DNA, 20 bp, Artificial sequence
  Synthetic oligonucleotide
aagatttttacaactcccag

SEQ ID NO: 3690 - DNA, 20 bp, Artificial sequence
  Synthetic oligonucleotide
aaagatttttacaactccca

SEQ ID NO: 3691 - DNA, 20 bp, Artificial sequence
  Synthetic oligonucleotide
aaaagatttttacaactccc

SEQ ID NO: 3692 - DNA, 20 bp, Artificial sequence
  Synthetic oligonucleotide
taaaagatttttacaactcc

SEQ ID NO: 3693 - DNA, 20 bp, Artificial sequence
  Synthetic oligonucleotide
ccttaaaagatttttacaac

SEQ ID NO: 3694 - DNA, 20 bp, Artificial sequence
  Synthetic oligonucleotide
gccttaaaagatttttacaa

SEQ ID NO: 3695 - DNA, 20 bp, Artificial sequence
  Synthetic oligonucleotide
ggccttaaaagatttttaca

SEQ ID NO: 3696 - DNA, 20 bp, Artificial sequence
  Synthetic oligonucleotide
tggccttaaaagatttttac

SEQ ID NO: 3697 - DNA, 20 bp, Artificial sequence
  Synthetic oligonucleotide
ctggccttaaaagattttta

SEQ ID NO: 3698 - DNA, 20 bp, Artificial sequence
  Synthetic oligonucleotide
tctggccttaaaagattttt

SEQ ID NO: 3699 - DNA, 20 bp, Artificial sequence
  Synthetic oligonucleotide
gtctggccttaaaagatttt

SEQ ID NO: 3700 - DNA, 20 bp, Artificial sequence
  Synthetic oligonucleotide
ggtctggccttaaaagattt

SEQ ID NO: 3701 - DNA, 20 bp, Artificial sequence
  Synthetic oligonucleotide
atccctcaaattggtctggc

SEQ ID NO: 3702 - DNA, 20 bp, Artificial sequence
  Synthetic oligonucleotide
aatccctcaaattggtctgg

SEQ ID NO: 3703 - DNA, 20 bp, Artificial sequence
  Synthetic oligonucleotide
aaatccctcaaattggtctg

SEQ ID NO: 3704 - DNA, 20 bp, Artificial sequence
  Synthetic oligonucleotide
aaaatccctcaaattggtct

SEQ ID NO: 3705 - DNA, 20 bp, Artificial sequence
  Synthetic oligonucleotide
taaaatccctcaaattggtc

SEQ ID NO: 3706 - DNA, 20 bp, Artificial sequence
  Synthetic oligonucleotide
ttaaaatccctcaaattggt

SEQ ID NO: 3707 - DNA, 20 bp, Artificial sequence
  Synthetic oligonucleotide
tttaaaatccctcaaattgg

SEQ ID NO: 3708 - DNA, 20 bp, Artificial sequence
  Synthetic oligonucleotide
ttttaaaatccctcaaattg

SEQ ID NO: 3709 - DNA, 20 bp, Artificial sequence
  Synthetic oligonucleotide
ctttttaaaatccctcaaat

SEQ ID NO: 3710 - DNA, 20 bp, Artificial sequence
  Synthetic oligonucleotide
actttttaaaatccctcaaa

SEQ ID NO: 3711 - DNA, 20 bp, Artificial sequence
  Synthetic oligonucleotide
cactttttaaaatccctcaa

SEQ ID NO: 3712 - DNA, 20 bp, Artificial sequence
  Synthetic oligonucleotide
acactttttaaaatccctca

SEQ ID NO: 3713 - DNA, 20 bp, Artificial sequence
  Synthetic oligonucleotide
gacactttttaaaatccctc

SEQ ID NO: 3714 - DNA, 20 bp, Artificial sequence
  Synthetic oligonucleotide
agacactttttaaaatccct

SEQ ID NO: 3715 - DNA, 20 bp, Artificial sequence
  Synthetic oligonucleotide
gagacactttttaaaatccc

SEQ ID NO: 3716 - DNA, 20 bp, Artificial sequence
  Synthetic oligonucleotide
tgagacactttttaaaatcc

SEQ ID NO: 3717 - DNA, 20 bp, Artificial sequence
  Synthetic oligonucleotide
ctgagacactttttaaaatc

SEQ ID NO: 3718 - DNA, 20 bp, Artificial sequence
  Synthetic oligonucleotide
actgagacactttttaaaat

SEQ ID NO: 3719 - DNA, 20 bp, Artificial sequence
  Synthetic oligonucleotide
cactgagacactttttaaaa

SEQ ID NO: 3720 - DNA, 20 bp, Artificial sequence
  Synthetic oligonucleotide
gcactgagacactttttaaa

SEQ ID NO: 3721 - DNA, 20 bp, Artificial sequence
  Synthetic oligonucleotide
ggcactgagacactttttaa

SEQ ID NO: 3722 - DNA, 20 bp, Artificial sequence
  Synthetic oligonucleotide
aggcactgagacacttttta

SEQ ID NO: 3723 - DNA, 20 bp, Artificial sequence
  Synthetic oligonucleotide
tctgaaatcataagaggcac

SEQ ID NO: 3724 - DNA, 20 bp, Artificial sequence
  Synthetic oligonucleotide
ttctgaaatcataagaggca

SEQ ID NO: 3725 - DNA, 20 bp, Artificial sequence
  Synthetic oligonucleotide
cttctgaaatcataagaggc

SEQ ID NO: 3726 - DNA, 20 bp, Artificial sequence
  Synthetic oligonucleotide
ccttctgaaatcataagagg

SEQ ID NO: 3727 - DNA, 20 bp, Artificial sequence
  Synthetic oligonucleotide
accttctgaaatcataagag

SEQ ID NO: 3728 - DNA, 20 bp, Artificial sequence
  Synthetic oligonucleotide
aaccttctgaaatcataaga

SEQ ID NO: 3729 - DNA, 20 bp, Artificial sequence
  Synthetic oligonucleotide
aaaccttctgaaatcataag

SEQ ID NO: 3730 - DNA, 20 bp, Artificial sequence
  Synthetic oligonucleotide
aaaaccttctgaaatcataa

SEQ ID NO: 3731 - DNA, 20 bp, Artificial sequence
  Synthetic oligonucleotide
caaaaccttctgaaatcata

SEQ ID NO: 3732 - DNA, 20 bp, Artificial sequence
  Synthetic oligonucleotide
gcaaaaccttctgaaatcat

SEQ ID NO: 3733 - DNA, 20 bp, Artificial sequence
  Synthetic oligonucleotide
agcaaaaccttctgaaatca

SEQ ID NO: 3734 - DNA, 20 bp, Artificial sequence
  Synthetic oligonucleotide
tagcaaaaccttctgaaatc

SEQ ID NO: 3735 - DNA, 20 bp, Artificial sequence
  Synthetic oligonucleotide
atagcaaaaccttctgaaat

SEQ ID NO: 3736 - DNA, 20 bp, Artificial sequence
  Synthetic oligonucleotide
tatagcaaaaccttctgaaa

SEQ ID NO: 3737 - DNA, 20 bp, Artificial sequence
  Synthetic oligonucleotide
atatagcaaaaccttctgaa

SEQ ID NO: 3738 - DNA, 20 bp, Artificial sequence
  Synthetic oligonucleotide
catatagcaaaaccttctga

SEQ ID NO: 3739 - DNA, 20 bp, Artificial sequence
  Synthetic oligonucleotide
acatatagcaaaaccttctg

SEQ ID NO: 3740 - DNA, 20 bp, Artificial sequence
  Synthetic oligonucleotide
tacatatagcaaaaccttct

SEQ ID NO: 3741 - DNA, 20 bp, Artificial sequence
  Synthetic oligonucleotide
ttacatatagcaaaaccttc

SEQ ID NO: 3742 - DNA, 20 bp, Artificial sequence
  Synthetic oligonucleotide
attacatatagcaaaacctt

SEQ ID NO: 3743 - DNA, 20 bp, Artificial sequence
  Synthetic oligonucleotide
gattacatatagcaaaacct

SEQ ID NO: 3744 - DNA, 20 bp, Artificial sequence
  Synthetic oligonucleotide
ggattacatatagcaaaacc

SEQ ID NO: 3745 - DNA, 20 bp, Artificial sequence
  Synthetic oligonucleotide
gggattacatatagcaaaac

SEQ ID NO: 3746 - DNA, 20 bp, Artificial sequence
  Synthetic oligonucleotide
tgggattacatatagcaaaa

SEQ ID NO: 3747 - DNA, 20 bp, Artificial sequence
  Synthetic oligonucleotide
ttgggattacatatagcaaa

SEQ ID NO: 3748 - DNA, 20 bp, Artificial sequence
  Synthetic oligonucleotide
gttgggattacatatagcaa

SEQ ID NO: 3749 - DNA, 20 bp, Artificial sequence
  Synthetic oligonucleotide
agttgggattacatatagca

SEQ ID NO: 3750 - DNA, 20 bp, Artificial sequence
  Synthetic oligonucleotide
tagttgggattacatatagc

SEQ ID NO: 3751 - DNA, 20 bp, Artificial sequence
  Synthetic oligonucleotide
gtagttgggattacatatag

SEQ ID NO: 3752 - DNA, 20 bp, Artificial sequence
  Synthetic oligonucleotide
agtagttgggattacatata

SEQ ID NO: 3753 - DNA, 20 bp, Artificial sequence
  Synthetic oligonucleotide
cagtagttgggattacatat

SEQ ID NO: 3754 - DNA, 20 bp, Artificial sequence
  Synthetic oligonucleotide
acagtagttgggattacata

SEQ ID NO: 3755 - DNA, 20 bp, Artificial sequence
  Synthetic oligonucleotide
aacagtagttgggattacat

SEQ ID NO: 3756 - DNA, 20 bp, Artificial sequence
  Synthetic oligonucleotide
aaacagtagttgggattaca

SEQ ID NO: 3757 - DNA, 20 bp, Artificial sequence
  Synthetic oligonucleotide
aaaacagtagttgggattac

SEQ ID NO: 3758 - DNA, 20 bp, Artificial sequence
  Synthetic oligonucleotide
gaaaacagtagttgggatta

SEQ ID NO: 3759 - DNA, 20 bp, Artificial sequence
  Synthetic oligonucleotide
agaaaacagtagttgggatt

SEQ ID NO: 3760 - DNA, 20 bp, Artificial sequence
  Synthetic oligonucleotide
aagaaaacagtagttgggat

SEQ ID NO: 3761 - DNA, 20 bp, Artificial sequence
  Synthetic oligonucleotide
caagaaaacagtagttggga

SEQ ID NO: 3762 - DNA, 20 bp, Artificial sequence
  Synthetic oligonucleotide
tcaagaaaacagtagttggg

SEQ ID NO: 3763 - DNA, 20 bp, Artificial sequence
  Synthetic oligonucleotide
ctcaagaaaacagtagttgg

SEQ ID NO: 3764 - DNA, 20 bp, Artificial sequence
  Synthetic oligonucleotide
tctcaagaaaacagtagttg

SEQ ID NO: 3765 - DNA, 20 bp, Artificial sequence
  Synthetic oligonucleotide
actctcaagaaaacagtagt

SEQ ID NO: 3766 - DNA, 20 bp, Artificial sequence
  Synthetic oligonucleotide
tactctcaagaaaacagtag

SEQ ID NO: 3767 - DNA, 20 bp, Artificial sequence
  Synthetic oligonucleotide
ctactctcaagaaaacagta

SEQ ID NO: 3768 - DNA, 20 bp, Artificial sequence
  Synthetic oligonucleotide
gctactctcaagaaaacagt

SEQ ID NO: 3769 - DNA, 20 bp, Artificial sequence
  Synthetic oligonucleotide
tgctactctcaagaaaacag

SEQ ID NO: 3770 - DNA, 20 bp, Artificial sequence
  Synthetic oligonucleotide
ctgctactctcaagaaaaca

SEQ ID NO: 3771 - DNA, 20 bp, Artificial sequence
  Synthetic oligonucleotide
tctgctactctcaagaaaac

SEQ ID NO: 3772 - DNA, 20 bp, Artificial sequence
  Synthetic oligonucleotide
ctctgctactctcaagaaaa

SEQ ID NO: 3773 - DNA, 20 bp, Artificial sequence
  Synthetic oligonucleotide
cctctgctactctcaagaaa

SEQ ID NO: 3774 - DNA, 20 bp, Artificial sequence
  Synthetic oligonucleotide
tcctctgctactctcaagaa

SEQ ID NO: 3775 - DNA, 20 bp, Artificial sequence
  Synthetic oligonucleotide
atcctctgctactctcaaga

SEQ ID NO: 3776 - DNA, 20 bp, Artificial sequence
  Synthetic oligonucleotide
aatcctctgctactctcaag

SEQ ID NO: 3777 - DNA, 20 bp, Artificial sequence
  Synthetic oligonucleotide
taatcctctgctactctcaa

SEQ ID NO: 3778 - DNA, 20 bp, Artificial sequence
  Synthetic oligonucleotide
ctaatcctctgctactctca

SEQ ID NO: 3779 - DNA, 20 bp, Artificial sequence
  Synthetic oligonucleotide
tctaatcctctgctactctc

SEQ ID NO: 3780 - DNA, 20 bp, Artificial sequence
  Synthetic oligonucleotide
ttctaatcctctgctactct

SEQ ID NO: 3781 - DNA, 20 bp, Artificial sequence
  Synthetic oligonucleotide
tttctaatcctctgctactc

SEQ ID NO: 3782 - DNA, 20 bp, Artificial sequence
  Synthetic oligonucleotide
ttttctaatcctctgctact

SEQ ID NO: 3783 - DNA, 20 bp, Artificial sequence
  Synthetic oligonucleotide
tttttctaatcctctgctac

SEQ ID NO: 3784 - DNA, 20 bp, Artificial sequence
  Synthetic oligonucleotide
ctttttctaatcctctgcta

SEQ ID NO: 3785 - DNA, 20 bp, Artificial sequence
  Synthetic oligonucleotide
actttttctaatcctctgct

SEQ ID NO: 3786 - DNA, 20 bp, Artificial sequence
  Synthetic oligonucleotide
gactttttctaatcctctgc

SEQ ID NO: 3787 - DNA, 20 bp, Artificial sequence
  Synthetic oligonucleotide
ggactttttctaatcctctg

SEQ ID NO: 3788 - DNA, 20 bp, Artificial sequence
  Synthetic oligonucleotide
aggactttttctaatcctct

SEQ ID NO: 3789 - DNA, 20 bp, Artificial sequence
  Synthetic oligonucleotide
tggaggactttttctaatcc

SEQ ID NO: 3790 - DNA, 20 bp, Artificial sequence
  Synthetic oligonucleotide
atggaggactttttctaatc

SEQ ID NO: 3791 - DNA, 20 bp, Artificial sequence
  Synthetic oligonucleotide
tatggaggactttttctaat

SEQ ID NO: 3792 - DNA, 20 bp, Artificial sequence
  Synthetic oligonucleotide
ttatggaggactttttctaa

SEQ ID NO: 3793 - DNA, 20 bp, Artificial sequence
  Synthetic oligonucleotide
tttatggaggactttttcta

SEQ ID NO: 3794 - DNA, 20 bp, Artificial sequence
  Synthetic oligonucleotide
atttatggaggactttttct

SEQ ID NO: 3795 - DNA, 20 bp, Artificial sequence
  Synthetic oligonucleotide
aatttatggaggactttttc

SEQ ID NO: 3796 - DNA, 20 bp, Artificial sequence
  Synthetic oligonucleotide
taatttatggaggacttttt

SEQ ID NO: 3797 - DNA, 20 bp, Artificial sequence
  Synthetic oligonucleotide
ataatttatggaggactttt

SEQ ID NO: 3798 - DNA, 20 bp, Artificial sequence
  Synthetic oligonucleotide
cataatttatggaggacttt

SEQ ID NO: 3799 - DNA, 20 bp, Artificial sequence
  Synthetic oligonucleotide
aggccggttacataatttat

SEQ ID NO: 3800 - DNA, 20 bp, Artificial sequence
  Synthetic oligonucleotide
aaggccggttacataattta

SEQ ID NO: 3801 - DNA, 20 bp, Artificial sequence
  Synthetic oligonucleotide
gaaggccggttacataattt

SEQ ID NO: 3802 - DNA, 20 bp, Artificial sequence
  Synthetic oligonucleotide
ggaaggccggttacataatt

SEQ ID NO: 3803 - DNA, 20 bp, Artificial sequence
  Synthetic oligonucleotide
agtcaggctagtcaggaagg

SEQ ID NO: 3804 - DNA, 20 bp, Artificial sequence
  Synthetic oligonucleotide
gagtcaggctagtcaggaag

SEQ ID NO: 3805 - DNA, 20 bp, Artificial sequence
  Synthetic oligonucleotide
tgagtcaggctagtcaggaa

SEQ ID NO: 3806 - DNA, 20 bp, Artificial sequence
  Synthetic oligonucleotide
ttgagtcaggctagtcagga

SEQ ID NO: 3807 - DNA, 20 bp, Artificial sequence
  Synthetic oligonucleotide
cttgagtcaggctagtcagg

SEQ ID NO: 3808 - DNA, 20 bp, Artificial sequence
  Synthetic oligonucleotide
gcttgagtcaggctagtcag

SEQ ID NO: 3809 - DNA, 20 bp, Artificial sequence
  Synthetic oligonucleotide
tgcttgagtcaggctagtca

SEQ ID NO: 3810 - DNA, 20 bp, Artificial sequence
  Synthetic oligonucleotide
ttgcttgagtcaggctagtc

SEQ ID NO: 3811 - DNA, 20 bp, Artificial sequence
  Synthetic oligonucleotide
attgcttgagtcaggctagt

SEQ ID NO: 3812 - DNA, 20 bp, Artificial sequence
  Synthetic oligonucleotide
cattgcttgagtcaggctag

SEQ ID NO: 3813 - DNA, 20 bp, Artificial sequence
  Synthetic oligonucleotide
acattgcttgagtcaggcta

SEQ ID NO: 3814 - DNA, 20 bp, Artificial sequence
  Synthetic oligonucleotide
tacattgcttgagtcaggct

SEQ ID NO: 3815 - DNA, 20 bp, Artificial sequence
  Synthetic oligonucleotide
ttacattgcttgagtcaggc

SEQ ID NO: 3816 - DNA, 20 bp, Artificial sequence
  Synthetic oligonucleotide
cttacattgcttgagtcagg

SEQ ID NO: 3817 - DNA, 20 bp, Artificial sequence
  Synthetic oligonucleotide
tcttacattgcttgagtcag

SEQ ID NO: 3818 - DNA, 20 bp, Artificial sequence
  Synthetic oligonucleotide
ctcttacattgcttgagtca

SEQ ID NO: 3819 - DNA, 20 bp, Artificial sequence
  Synthetic oligonucleotide
tctcttacattgcttgagtc

SEQ ID NO: 3820 - DNA, 20 bp, Artificial sequence
  Synthetic oligonucleotide
atctcttacattgcttgagt

SEQ ID NO: 3821 - DNA, 20 bp, Artificial sequence
  Synthetic oligonucleotide
tatctcttacattgcttgag

SEQ ID NO: 3822 - DNA, 20 bp, Artificial sequence
  Synthetic oligonucleotide
ttatctcttacattgcttga

SEQ ID NO: 3823 - DNA, 20 bp, Artificial sequence
  Synthetic oligonucleotide
attatctcttacattgcttg

SEQ ID NO: 3824 - DNA, 20 bp, Artificial sequence
  Synthetic oligonucleotide
aattatctcttacattgctt

SEQ ID NO: 3825 - DNA, 20 bp, Artificial sequence
  Synthetic oligonucleotide
taattatctcttacattgct

SEQ ID NO: 3826 - DNA, 20 bp, Artificial sequence
  Synthetic oligonucleotide
ataattatctcttacattgc

SEQ ID NO: 3827 - DNA, 20 bp, Artificial sequence
  Synthetic oligonucleotide
cagaataattatctcttaca

SEQ ID NO: 3828 - DNA, 20 bp, Artificial sequence
  Synthetic oligonucleotide
acagaataattatctcttac

SEQ ID NO: 3829 - DNA, 20 bp, Artificial sequence
  Synthetic oligonucleotide
gaaaacagaataattatctc

SEQ ID NO: 3830 - DNA, 20 bp, Artificial sequence
  Synthetic oligonucleotide
ccacacttataaattatgaa

SEQ ID NO: 3831 - DNA, 20 bp, Artificial sequence
  Synthetic oligonucleotide
cccacacttataaattatga

SEQ ID NO: 3832 - DNA, 20 bp, Artificial sequence
  Synthetic oligonucleotide
ccccacacttataaattatg

SEQ ID NO: 3833 - DNA, 20 bp, Artificial sequence
  Synthetic oligonucleotide
cccccacacttataaattat

SEQ ID NO: 3834 - DNA, 20 bp, Artificial sequence
  Synthetic oligonucleotide
gcccccacacttataaatta

SEQ ID NO: 3835 - DNA, 20 bp, Artificial sequence
  Synthetic oligonucleotide
tgcccccacacttataaatt

SEQ ID NO: 3836 - DNA, 20 bp, Artificial sequence
  Synthetic oligonucleotide
atgcccccacacttataaat

SEQ ID NO: 3837 - DNA, 20 bp, Artificial sequence
  Synthetic oligonucleotide
catgcccccacacttataaa

SEQ ID NO: 3838 - DNA, 20 bp, Artificial sequence
  Synthetic oligonucleotide
gcatgcccccacacttataa

SEQ ID NO: 3839 - DNA, 20 bp, Artificial sequence
  Synthetic oligonucleotide
ggcatgcccccacacttata

SEQ ID NO: 3840 - DNA, 20 bp, Artificial sequence
  Synthetic oligonucleotide
aggttgtttttatgctgagg

SEQ ID NO: 3841 - DNA, 20 bp, Artificial sequence
  Synthetic oligonucleotide
taggttgtttttatgctgag

SEQ ID NO: 3842 - DNA, 20 bp, Artificial sequence
  Synthetic oligonucleotide
ataggttgtttttatgctga

SEQ ID NO: 3843 - DNA, 20 bp, Artificial sequence
  Synthetic oligonucleotide
aataggttgtttttatgctg

SEQ ID NO: 3844 - DNA, 20 bp, Artificial sequence
  Synthetic oligonucleotide
taataggttgtttttatgct

SEQ ID NO: 3845 - DNA, 20 bp, Artificial sequence
  Synthetic oligonucleotide
ctaataggttgtttttatgc

SEQ ID NO: 3846 - DNA, 20 bp, Artificial sequence
  Synthetic oligonucleotide
cctaataggttgtttttatg

SEQ ID NO: 3847 - DNA, 20 bp, Artificial sequence
  Synthetic oligonucleotide
ccctaataggttgtttttat

SEQ ID NO: 3848 - DNA, 20 bp, Artificial sequence
  Synthetic oligonucleotide
tccctaataggttgttttta

SEQ ID NO: 3849 - DNA, 20 bp, Artificial sequence
  Synthetic oligonucleotide
ttccctaataggttgttttt

SEQ ID NO: 3850 - DNA, 20 bp, Artificial sequence
  Synthetic oligonucleotide
tttccctaataggttgtttt

SEQ ID NO: 3851 - DNA, 20 bp, Artificial sequence
  Synthetic oligonucleotide
ttttccctaataggttgttt

SEQ ID NO: 3852 - DNA, 20 bp, Artificial sequence
  Synthetic oligonucleotide
tttttccctaataggttgtt

SEQ ID NO: 3853 - DNA, 20 bp, Artificial sequence
  Synthetic oligonucleotide
atttttccctaataggttgt

SEQ ID NO: 3854 - DNA, 20 bp, Artificial sequence
  Synthetic oligonucleotide
tatttttccctaataggttg

SEQ ID NO: 3855 - DNA, 20 bp, Artificial sequence
  Synthetic oligonucleotide
atatttttccctaataggtt

SEQ ID NO: 3856 - DNA, 20 bp, Artificial sequence
  Synthetic oligonucleotide
gatatttttccctaataggt

SEQ ID NO: 3857 - DNA, 20 bp, Artificial sequence
  Synthetic oligonucleotide
agatatttttccctaatagg

SEQ ID NO: 3858 - DNA, 20 bp, Artificial sequence
  Synthetic oligonucleotide
tagatatttttccctaatag

SEQ ID NO: 3859 - DNA, 20 bp, Artificial sequence
  Synthetic oligonucleotide
ctattagatatttttcccta

SEQ ID NO: 3860 - DNA, 20 bp, Artificial sequence
  Synthetic oligonucleotide
tctattagatatttttccct

SEQ ID NO: 3861 - DNA, 20 bp, Artificial sequence
  Synthetic oligonucleotide
atctattagatatttttccc

SEQ ID NO: 3862 - DNA, 20 bp, Artificial sequence
  Synthetic oligonucleotide
gataaaggtaatctattaga

SEQ ID NO: 3863 - DNA, 20 bp, Artificial sequence
  Synthetic oligonucleotide
cgataaaggtaatctattag

SEQ ID NO: 3864 - DNA, 20 bp, Artificial sequence
  Synthetic oligonucleotide
gcgataaaggtaatctatta

SEQ ID NO: 3865 - DNA, 20 bp, Artificial sequence
  Synthetic oligonucleotide
ggcgataaaggtaatctatt

SEQ ID NO: 3866 - DNA, 20 bp, Artificial sequence
  Synthetic oligonucleotide
aggcgataaaggtaatctat

SEQ ID NO: 3867 - DNA, 20 bp, Artificial sequence
  Synthetic oligonucleotide
caggcgataaaggtaatcta

SEQ ID NO: 3868 - DNA, 20 bp, Artificial sequence
  Synthetic oligonucleotide
acaggcgataaaggtaatct

SEQ ID NO: 3869 - DNA, 20 bp, Artificial sequence
  Synthetic oligonucleotide
aacaggcgataaaggtaatc

SEQ ID NO: 3870 - DNA, 20 bp, Artificial sequence
  Synthetic oligonucleotide
taacaggcgataaaggtaat

SEQ ID NO: 3871 - DNA, 20 bp, Artificial sequence
  Synthetic oligonucleotide
ctaacaggcgataaaggtaa

SEQ ID NO: 3872 - DNA, 20 bp, Artificial sequence
  Synthetic oligonucleotide
cctaacaggcgataaaggta

SEQ ID NO: 3873 - DNA, 20 bp, Artificial sequence
  Synthetic oligonucleotide
ccctaacaggcgataaaggt

SEQ ID NO: 3874 - DNA, 20 bp, Artificial sequence
  Synthetic oligonucleotide
accctaacaggcgataaagg

SEQ ID NO: 3875 - DNA, 20 bp, Artificial sequence
  Synthetic oligonucleotide
aaccctaacaggcgataaag

SEQ ID NO: 3876 - DNA, 20 bp, Artificial sequence
  Synthetic oligonucleotide
aaaccctaacaggcgataaa

SEQ ID NO: 3877 - DNA, 20 bp, Artificial sequence
  Synthetic oligonucleotide
aaaaccctaacaggcgataa

SEQ ID NO: 3878 - DNA, 20 bp, Artificial sequence
  Synthetic oligonucleotide
taaaaccctaacaggcgata

SEQ ID NO: 3879 - DNA, 20 bp, Artificial sequence
  Synthetic oligonucleotide
ataaaaccctaacaggcgat

SEQ ID NO: 3880 - DNA, 20 bp, Artificial sequence
  Synthetic oligonucleotide
cataaaaccctaacaggcga

SEQ ID NO: 3881 - DNA, 20 bp, Artificial sequence
  Synthetic oligonucleotide
acataaaaccctaacaggcg

SEQ ID NO: 3882 - DNA, 20 bp, Artificial sequence
  Synthetic oligonucleotide
aacataaaaccctaacaggc

SEQ ID NO: 3883 - DNA, 20 bp, Artificial sequence
  Synthetic oligonucleotide
caacataaaaccctaacagg

SEQ ID NO: 3884 - DNA, 20 bp, Artificial sequence
  Synthetic oligonucleotide
acaacataaaaccctaacag

SEQ ID NO: 3885 - DNA, 20 bp, Artificial sequence
  Synthetic oligonucleotide
aacaacataaaaccctaaca

SEQ ID NO: 3886 - DNA, 20 bp, Artificial sequence
  Synthetic oligonucleotide
aaacaacataaaaccctaac

SEQ ID NO: 3887 - DNA, 20 bp, Artificial sequence
  Synthetic oligonucleotide
aaaacaacataaaaccctaa

SEQ ID NO: 3888 - DNA, 20 bp, Artificial sequence
  Synthetic oligonucleotide
aaaaacaacataaaacccta

SEQ ID NO: 3889 - DNA, 20 bp, Artificial sequence
  Synthetic oligonucleotide
taaaaacaacataaaaccct

SEQ ID NO: 3890 - DNA, 20 bp, Artificial sequence
  Synthetic oligonucleotide
ttaaaaacaacataaaaccc

SEQ ID NO: 3891 - DNA, 20 bp, Artificial sequence
  Synthetic oligonucleotide
gttaaaaacaacataaaacc

SEQ ID NO: 3892 - DNA, 20 bp, Artificial sequence
  Synthetic oligonucleotide
ctgagttaaaaacaacataa

SEQ ID NO: 3893 - DNA, 20 bp, Artificial sequence
  Synthetic oligonucleotide
tctgagttaaaaacaacata

SEQ ID NO: 3894 - DNA, 20 bp, Artificial sequence
  Synthetic oligonucleotide
atctgagttaaaaacaacat

SEQ ID NO: 3895 - DNA, 20 bp, Artificial sequence
  Synthetic oligonucleotide
catctgagttaaaaacaaca

SEQ ID NO: 3896 - DNA, 20 bp, Artificial sequence
  Synthetic oligonucleotide
gcatctgagttaaaaacaac

SEQ ID NO: 3897 - DNA, 20 bp, Artificial sequence
  Synthetic oligonucleotide
ggcatctgagttaaaaacaa

SEQ ID NO: 3898 - DNA, 20 bp, Artificial sequence
  Synthetic oligonucleotide
tggcatctgagttaaaaaca

SEQ ID NO: 3899 - DNA, 20 bp, Artificial sequence
  Synthetic oligonucleotide
atggcatctgagttaaaaac

SEQ ID NO: 3900 - DNA, 20 bp, Artificial sequence
  Synthetic oligonucleotide
tatggcatctgagttaaaaa

SEQ ID NO: 3901 - DNA, 20 bp, Artificial sequence
  Synthetic oligonucleotide
ttatggcatctgagttaaaa

SEQ ID NO: 3902 - DNA, 20 bp, Artificial sequence
  Synthetic oligonucleotide
cttatggcatctgagttaaa

SEQ ID NO: 3903 - DNA, 20 bp, Artificial sequence
  Synthetic oligonucleotide
tcttatggcatctgagttaa

SEQ ID NO: 3904 - DNA, 20 bp, Artificial sequence
  Synthetic oligonucleotide
ttcttatggcatctgagtta

SEQ ID NO: 3905 - DNA, 20 bp, Artificial sequence
  Synthetic oligonucleotide
gttcttatggcatctgagtt

SEQ ID NO: 3906 - DNA, 20 bp, Artificial sequence
  Synthetic oligonucleotide
tgttcttatggcatctgagt

SEQ ID NO: 3907 - DNA, 20 bp, Artificial sequence
  Synthetic oligonucleotide
ttgttcttatggcatctgag

SEQ ID NO: 3908 - DNA, 20 bp, Artificial sequence
  Synthetic oligonucleotide
tttgttcttatggcatctga

SEQ ID NO: 3909 - DNA, 20 bp, Artificial sequence
  Synthetic oligonucleotide
ctttgttcttatggcatctg

SEQ ID NO: 3910 - DNA, 20 bp, Artificial sequence
  Synthetic oligonucleotide
tctttgttcttatggcatct

SEQ ID NO: 3911 - DNA, 20 bp, Artificial sequence
  Synthetic oligonucleotide
atctttgttcttatggcatc

SEQ ID NO: 3912 - DNA, 20 bp, Artificial sequence
  Synthetic oligonucleotide
tatctttgttcttatggcat

SEQ ID NO: 3913 - DNA, 20 bp, Artificial sequence
  Synthetic oligonucleotide
gtatctttgttcttatggca

SEQ ID NO: 3914 - DNA, 20 bp, Artificial sequence
  Synthetic oligonucleotide
tgtatctttgttcttatggc

SEQ ID NO: 3915 - DNA, 20 bp, Artificial sequence
  Synthetic oligonucleotide
atgtatctttgttcttatgg

SEQ ID NO: 3916 - DNA, 20 bp, Artificial sequence
  Synthetic oligonucleotide
catgtatctttgttcttatg

SEQ ID NO: 3917 - DNA, 20 bp, Artificial sequence
  Synthetic oligonucleotide
acatgtatctttgttcttat

SEQ ID NO: 3918 - DNA, 20 bp, Artificial sequence
  Synthetic oligonucleotide
tacatgtatctttgttctta

SEQ ID NO: 3919 - DNA, 20 bp, Artificial sequence
  Synthetic oligonucleotide
ttacatgtatctttgttctt

SEQ ID NO: 3920 - DNA, 20 bp, Artificial sequence
  Synthetic oligonucleotide
attacatgtatctttgttct

SEQ ID NO: 3921 - DNA, 20 bp, Artificial sequence
  Synthetic oligonucleotide
aattacatgtatctttgttc

SEQ ID NO: 3922 - DNA, 20 bp, Artificial sequence
  Synthetic oligonucleotide
cacaatataggtattaatga

SEQ ID NO: 3923 - DNA, 20 bp, Artificial sequence
  Synthetic oligonucleotide
gcacaatataggtattaatg

SEQ ID NO: 3924 - DNA, 20 bp, Artificial sequence
  Synthetic oligonucleotide
agcacaatataggtattaat

SEQ ID NO: 3925 - DNA, 20 bp, Artificial sequence
  Synthetic oligonucleotide
aagcacaatataggtattaa

SEQ ID NO: 3926 - DNA, 20 bp, Artificial sequence
  Synthetic oligonucleotide
aaagcacaatataggtatta

SEQ ID NO: 3927 - DNA, 20 bp, Artificial sequence
  Synthetic oligonucleotide
taaagcacaatataggtatt

SEQ ID NO: 3928 - DNA, 20 bp, Artificial sequence
  Synthetic oligonucleotide
ttaaagcacaatataggtat

SEQ ID NO: 3929 - DNA, 20 bp, Artificial sequence
  Synthetic oligonucleotide
cttaaagcacaatataggta

SEQ ID NO: 3930 - DNA, 20 bp, Artificial sequence
  Synthetic oligonucleotide
ccttaaagcacaatataggt

SEQ ID NO: 3931 - DNA, 20 bp, Artificial sequence
  Synthetic oligonucleotide
accttaaagcacaatatagg

SEQ ID NO: 3932 - DNA, 20 bp, Artificial sequence
  Synthetic oligonucleotide
aaccttaaagcacaatatag

SEQ ID NO: 3933 - DNA, 20 bp, Artificial sequence
  Synthetic oligonucleotide
aaaccttaaagcacaatata

SEQ ID NO: 3934 - DNA, 20 bp, Artificial sequence
  Synthetic oligonucleotide
taaaccttaaagcacaatat

SEQ ID NO: 3935 - DNA, 20 bp, Artificial sequence
  Synthetic oligonucleotide
gtaaaccttaaagcacaata

SEQ ID NO: 3936 - DNA, 20 bp, Artificial sequence
  Synthetic oligonucleotide
tgtaaaccttaaagcacaat

SEQ ID NO: 3937 - DNA, 20 bp, Artificial sequence
  Synthetic oligonucleotide
ttgtaaaccttaaagcacaa

SEQ ID NO: 3938 - DNA, 20 bp, Artificial sequence
  Synthetic oligonucleotide
tttgtaaaccttaaagcaca

SEQ ID NO: 3939 - DNA, 20 bp, Artificial sequence
  Synthetic oligonucleotide
ttttgtaaaccttaaagcac

SEQ ID NO: 3940 - DNA, 20 bp, Artificial sequence
  Synthetic oligonucleotide
attttgtaaaccttaaagca

SEQ ID NO: 3941 - DNA, 20 bp, Artificial sequence
  Synthetic oligonucleotide
tattttgtaaaccttaaagc

SEQ ID NO: 3942 - DNA, 20 bp, Artificial sequence
  Synthetic oligonucleotide
ctaagataaagtatgagaaa

SEQ ID NO: 3943 - DNA, 20 bp, Artificial sequence
  Synthetic oligonucleotide
actaagataaagtatgagaa

SEQ ID NO: 3944 - DNA, 20 bp, Artificial sequence
  Synthetic oligonucleotide
aactaagataaagtatgaga

SEQ ID NO: 3945 - DNA, 20 bp, Artificial sequence
  Synthetic oligonucleotide
aaactaagataaagtatgag

SEQ ID NO: 3946 - DNA, 20 bp, Artificial sequence
  Synthetic oligonucleotide
ctaaactaagataaagtatg

SEQ ID NO: 3947 - DNA, 20 bp, Artificial sequence
  Synthetic oligonucleotide
gaaactaaactaagataaag

SEQ ID NO: 3948 - DNA, 20 bp, Artificial sequence
  Synthetic oligonucleotide
caagaaactaaactaagata

SEQ ID NO: 3949 - DNA, 20 bp, Artificial sequence
  Synthetic oligonucleotide
tcaagaaactaaactaagat

SEQ ID NO: 3950 - DNA, 20 bp, Artificial sequence
  Synthetic oligonucleotide
gtcaagaaactaaactaaga

SEQ ID NO: 3951 - DNA, 20 bp, Artificial sequence
  Synthetic oligonucleotide
tgtcaagaaactaaactaag

SEQ ID NO: 3952 - DNA, 20 bp, Artificial sequence
  Synthetic oligonucleotide
ctgtcaagaaactaaactaa

SEQ ID NO: 3953 - DNA, 20 bp, Artificial sequence
  Synthetic oligonucleotide
actgtcaagaaactaaacta

SEQ ID NO: 3954 - DNA, 20 bp, Artificial sequence
  Synthetic oligonucleotide
gactgtcaagaaactaaact

SEQ ID NO: 3955 - DNA, 20 bp, Artificial sequence
  Synthetic oligonucleotide
ggactgtcaagaaactaaac

SEQ ID NO: 3956 - DNA, 20 bp, Artificial sequence
  Synthetic oligonucleotide
tggactgtcaagaaactaaa

SEQ ID NO: 3957 - DNA, 20 bp, Artificial sequence
  Synthetic oligonucleotide
atggactgtcaagaaactaa

SEQ ID NO: 3958 - DNA, 20 bp, Artificial sequence
  Synthetic oligonucleotide
catggactgtcaagaaacta

SEQ ID NO: 3959 - DNA, 20 bp, Artificial sequence
  Synthetic oligonucleotide
tcatggactgtcaagaaact

SEQ ID NO: 3960 - DNA, 20 bp, Artificial sequence
  Synthetic oligonucleotide
ctcatggactgtcaagaaac

SEQ ID NO: 3961 - DNA, 20 bp, Artificial sequence
  Synthetic oligonucleotide
cctcatggactgtcaagaaa

SEQ ID NO: 3962 - DNA, 20 bp, Artificial sequence
  Synthetic oligonucleotide
ccaccttacctcatggactg

SEQ ID NO: 3963 - DNA, 20 bp, Artificial sequence
  Synthetic oligonucleotide
accaccttacctcatggact

SEQ ID NO: 3964 - DNA, 20 bp, Artificial sequence
  Synthetic oligonucleotide
taccaccttacctcatggac

SEQ ID NO: 3965 - DNA, 20 bp, Artificial sequence
  Synthetic oligonucleotide
ctaccaccttacctcatgga

SEQ ID NO: 3966 - DNA, 20 bp, Artificial sequence
  Synthetic oligonucleotide
agctaccaccttacctcatg

SEQ ID NO: 3967 - DNA, 20 bp, Artificial sequence
  Synthetic oligonucleotide
aagctaccaccttacctcat

SEQ ID NO: 3968 - DNA, 20 bp, Artificial sequence
  Synthetic oligonucleotide
aaagctaccaccttacctca

SEQ ID NO: 3969 - DNA, 20 bp, Artificial sequence
  Synthetic oligonucleotide
taaagctaccaccttacctc

SEQ ID NO: 3970 - DNA, 20 bp, Artificial sequence
  Synthetic oligonucleotide
ataaagctaccaccttacct

SEQ ID NO: 3971 - DNA, 20 bp, Artificial sequence
  Synthetic oligonucleotide
gataaagctaccaccttacc

SEQ ID NO: 3972 - DNA, 20 bp, Artificial sequence
  Synthetic oligonucleotide
tgataaagctaccaccttac

SEQ ID NO: 3973 - DNA, 20 bp, Artificial sequence
  Synthetic oligonucleotide
gtgataaagctaccacctta

SEQ ID NO: 3974 - DNA, 20 bp, Artificial sequence
  Synthetic oligonucleotide
aaaatggtgataaagctacc

SEQ ID NO: 3975 - DNA, 20 bp, Artificial sequence
  Synthetic oligonucleotide
taaaatggtgataaagctac

SEQ ID NO: 3976 - DNA, 20 bp, Artificial sequence
  Synthetic oligonucleotide
gtaaaatggtgataaagcta

SEQ ID NO: 3977 - DNA, 20 bp, Artificial sequence
  Synthetic oligonucleotide
tgtaaaatggtgataaagct

SEQ ID NO: 3978 - DNA, 20 bp, Artificial sequence
  Synthetic oligonucleotide
ttgtaaaatggtgataaagc

SEQ ID NO: 3979 - DNA, 20 bp, Artificial sequence
  Synthetic oligonucleotide
tttgtaaaatggtgataaag

SEQ ID NO: 3980 - DNA, 20 bp, Artificial sequence
  Synthetic oligonucleotide
ctttgtaaaatggtgataaa

SEQ ID NO: 3981 - DNA, 20 bp, Artificial sequence
  Synthetic oligonucleotide
actttgtaaaatggtgataa

SEQ ID NO: 3982 - DNA, 20 bp, Artificial sequence
  Synthetic oligonucleotide
cactttgtaaaatggtgata

SEQ ID NO: 3983 - DNA, 20 bp, Artificial sequence
  Synthetic oligonucleotide
ccactttgtaaaatggtgat

SEQ ID NO: 3984 - DNA, 20 bp, Artificial sequence
  Synthetic oligonucleotide
cccactttgtaaaatggtga

SEQ ID NO: 3985 - DNA, 20 bp, Artificial sequence
  Synthetic oligonucleotide
tcccactttgtaaaatggtg

SEQ ID NO: 3986 - DNA, 20 bp, Artificial sequence
  Synthetic oligonucleotide
ttcccactttgtaaaatggt

SEQ ID NO: 3987 - DNA, 20 bp, Artificial sequence
  Synthetic oligonucleotide
tttcccactttgtaaaatgg

SEQ ID NO: 3988 - DNA, 20 bp, Artificial sequence
  Synthetic oligonucleotide
gtttcccactttgtaaaatg

SEQ ID NO: 3989 - DNA, 20 bp, Artificial sequence
  Synthetic oligonucleotide
cgtttcccactttgtaaaat

SEQ ID NO: 3990 - DNA, 20 bp, Artificial sequence
  Synthetic oligonucleotide
tcgtttcccactttgtaaaa

SEQ ID NO: 3991 - DNA, 20 bp, Artificial sequence
  Synthetic oligonucleotide
ttcgtttcccactttgtaaa

SEQ ID NO: 3992 - DNA, 20 bp, Artificial sequence
  Synthetic oligonucleotide
cttcgtttcccactttgtaa

SEQ ID NO: 3993 - DNA, 20 bp, Artificial sequence
  Synthetic oligonucleotide
ccttcgtttcccactttgta

SEQ ID NO: 3994 - DNA, 20 bp, Artificial sequence
  Synthetic oligonucleotide
accttcgtttcccactttgt

SEQ ID NO: 3995 - DNA, 20 bp, Artificial sequence
  Synthetic oligonucleotide
aaccttcgtttcccactttg

SEQ ID NO: 3996 - DNA, 20 bp, Artificial sequence
  Synthetic oligonucleotide
gaaccttcgtttcccacttt

SEQ ID NO: 3997 - DNA, 20 bp, Artificial sequence
  Synthetic oligonucleotide
ggaaccttcgtttcccactt

SEQ ID NO: 3998 - DNA, 20 bp, Artificial sequence
  Synthetic oligonucleotide
aggaaccttcgtttcccact

SEQ ID NO: 3999 - DNA, 20 bp, Artificial sequence
  Synthetic oligonucleotide
gaggaaccttcgtttcccac

SEQ ID NO: 4000 - DNA, 20 bp, Artificial sequence
  Synthetic oligonucleotide
agaggaaccttcgtttccca

SEQ ID NO: 4001 - DNA, 20 bp, Artificial sequence
  Synthetic oligonucleotide
aagaggaaccttcgtttccc

SEQ ID NO: 4002 - DNA, 20 bp, Artificial sequence
  Synthetic oligonucleotide
taagaggaaccttcgtttcc

SEQ ID NO: 4003 - DNA, 20 bp, Artificial sequence
  Synthetic oligonucleotide
ctaagaggaaccttcgtttc

SEQ ID NO: 4004 - DNA, 20 bp, Artificial sequence
  Synthetic oligonucleotide
cctaagaggaaccttcgttt

SEQ ID NO: 4005 - DNA, 20 bp, Artificial sequence
  Synthetic oligonucleotide
acaactaggttcctaagagg

SEQ ID NO: 4006 - DNA, 20 bp, Artificial sequence
  Synthetic oligonucleotide
gacaactaggttcctaagag

SEQ ID NO: 4007 - DNA, 20 bp, Artificial sequence
  Synthetic oligonucleotide
tgacaactaggttcctaaga

SEQ ID NO: 4008 - DNA, 20 bp, Artificial sequence
  Synthetic oligonucleotide
gtgacaactaggttcctaag

SEQ ID NO: 4009 - DNA, 20 bp, Artificial sequence
  Synthetic oligonucleotide
ggtgacaactaggttcctaa

SEQ ID NO: 4010 - DNA, 20 bp, Artificial sequence
  Synthetic oligonucleotide
aggtgacaactaggttccta

SEQ ID NO: 4011 - DNA, 20 bp, Artificial sequence
  Synthetic oligonucleotide
aaggtgacaactaggttcct

SEQ ID NO: 4012 - DNA, 20 bp, Artificial sequence
  Synthetic oligonucleotide
aaaggtgacaactaggttcc

SEQ ID NO: 4013 - DNA, 20 bp, Artificial sequence
  Synthetic oligonucleotide
caaaggtgacaactaggttc

SEQ ID NO: 4014 - DNA, 20 bp, Artificial sequence
  Synthetic oligonucleotide
acaaaggtgacaactaggtt

SEQ ID NO: 4015 - DNA, 20 bp, Artificial sequence
  Synthetic oligonucleotide
tacaaaggtgacaactaggt

SEQ ID NO: 4016 - DNA, 20 bp, Artificial sequence
  Synthetic oligonucleotide
atacaaaggtgacaactagg

SEQ ID NO: 4017 - DNA, 20 bp, Artificial sequence
  Synthetic oligonucleotide
tatacaaaggtgacaactag

SEQ ID NO: 4018 - DNA, 20 bp, Artificial sequence
  Synthetic oligonucleotide
ttatacaaaggtgacaacta

SEQ ID NO: 4019 - DNA, 20 bp, Artificial sequence
  Synthetic oligonucleotide
attatacaaaggtgacaact

SEQ ID NO: 4020 - DNA, 20 bp, Artificial sequence
  Synthetic oligonucleotide
tattatacaaaggtgacaac

SEQ ID NO: 4021 - DNA, 20 bp, Artificial sequence
  Synthetic oligonucleotide
ttattatacaaaggtgacaa

SEQ ID NO: 4022 - DNA, 20 bp, Artificial sequence
  Synthetic oligonucleotide
tttattatacaaaggtgaca

SEQ ID NO: 4023 - DNA, 20 bp, Artificial sequence
  Synthetic oligonucleotide
ttttattatacaaaggtgac

SEQ ID NO: 4024 - DNA, 20 bp, Artificial sequence
  Synthetic oligonucleotide
gttttattatacaaaggtga

SEQ ID NO: 4025 - DNA, 20 bp, Artificial sequence
  Synthetic oligonucleotide
agttttattatacaaaggtg

SEQ ID NO: 4026 - DNA, 20 bp, Artificial sequence
  Synthetic oligonucleotide
gaagttttattatacaaagg

SEQ ID NO: 4027 - DNA, 20 bp, Artificial sequence
  Synthetic oligonucleotide
cgaagttttattatacaaag

SEQ ID NO: 4028 - DNA, 20 bp, Artificial sequence
  Synthetic oligonucleotide
cttcgaagttttattataca

SEQ ID NO: 4029 - DNA, 20 bp, Artificial sequence
  Synthetic oligonucleotide
gcttcgaagttttattatac

SEQ ID NO: 4030 - DNA, 20 bp, Artificial sequence
  Synthetic oligonucleotide
agcttcgaagttttattata

SEQ ID NO: 4031 - DNA, 20 bp, Artificial sequence
  Synthetic oligonucleotide
gagcttcgaagttttattat

SEQ ID NO: 4032 - DNA, 20 bp, Artificial sequence
  Synthetic oligonucleotide
aaccagttaacagctccgag

SEQ ID NO: 4033 - DNA, 20 bp, Artificial sequence
  Synthetic oligonucleotide
aaaccagttaacagctccga

SEQ ID NO: 4034 - DNA, 20 bp, Artificial sequence
  Synthetic oligonucleotide
caaaccagttaacagctccg

SEQ ID NO: 4035 - DNA, 20 bp, Artificial sequence
  Synthetic oligonucleotide
gcaaaccagttaacagctcc

SEQ ID NO: 4036 - DNA, 20 bp, Artificial sequence
  Synthetic oligonucleotide
agcaaaccagttaacagctc

SEQ ID NO: 4037 - DNA, 20 bp, Artificial sequence
  Synthetic oligonucleotide
cagcaaaccagttaacagct

SEQ ID NO: 4038 - DNA, 20 bp, Artificial sequence
  Synthetic oligonucleotide
tcagcaaaccagttaacagc

SEQ ID NO: 4039 - DNA, 20 bp, Artificial sequence
  Synthetic oligonucleotide
ttcagcaaaccagttaacag

SEQ ID NO: 4040 - DNA, 20 bp, Artificial sequence
  Synthetic oligonucleotide
cttcagcaaaccagttaaca

SEQ ID NO: 4041 - DNA, 20 bp, Artificial sequence
  Synthetic oligonucleotide
ccttcagcaaaccagttaac

SEQ ID NO: 4042 - DNA, 20 bp, Artificial sequence
  Synthetic oligonucleotide
tcttacagctaagccttcag

SEQ ID NO: 4043 - DNA, 20 bp, Artificial sequence
  Synthetic oligonucleotide
ctcttacagctaagccttca

SEQ ID NO: 4044 - DNA, 20 bp, Artificial sequence
  Synthetic oligonucleotide
tctgaattctggctcttaca

SEQ ID NO: 4045 - DNA, 20 bp, Artificial sequence
  Synthetic oligonucleotide
gtctgaattctggctcttac

SEQ ID NO: 4046 - DNA, 20 bp, Artificial sequence
  Synthetic oligonucleotide
ggtctgaattctggctctta

SEQ ID NO: 4047 - DNA, 20 bp, Artificial sequence
  Synthetic oligonucleotide
gggtctgaattctggctctt

SEQ ID NO: 4048 - DNA, 20 bp, Artificial sequence
  Synthetic oligonucleotide
tgggtctgaattctggctct

SEQ ID NO: 4049 - DNA, 20 bp, Artificial sequence
  Synthetic oligonucleotide
ctgggtctgaattctggctc

SEQ ID NO: 4050 - DNA, 20 bp, Artificial sequence
  Synthetic oligonucleotide
cctgggtctgaattctggct

SEQ ID NO: 4051 - DNA, 20 bp, Artificial sequence
  Synthetic oligonucleotide
acctgggtctgaattctggc

SEQ ID NO: 4052 - DNA, 20 bp, Artificial sequence
  Synthetic oligonucleotide
gcagtttgaagtcactcaga

SEQ ID NO: 4053 - DNA, 20 bp, Artificial sequence
  Synthetic oligonucleotide
tgcagtttgaagtcactcag

SEQ ID NO: 4054 - DNA, 20 bp, Artificial sequence
  Synthetic oligonucleotide
gtgcagtttgaagtcactca

SEQ ID NO: 4055 - DNA, 20 bp, Artificial sequence
  Synthetic oligonucleotide
tgtgcagtttgaagtcactc

SEQ ID NO: 4056 - DNA, 20 bp, Artificial sequence
  Synthetic oligonucleotide
ctgtgcagtttgaagtcact

SEQ ID NO: 4057 - DNA, 20 bp, Artificial sequence
  Synthetic oligonucleotide
actgtgcagtttgaagtcac

SEQ ID NO: 4058 - DNA, 20 bp, Artificial sequence
  Synthetic oligonucleotide
taatgggaaggactgtgcag

SEQ ID NO: 4059 - DNA, 20 bp, Artificial sequence
  Synthetic oligonucleotide
ataatgggaaggactgtgca

SEQ ID NO: 4060 - DNA, 20 bp, Artificial sequence
  Synthetic oligonucleotide
aataatgggaaggactgtgc

SEQ ID NO: 4061 - DNA, 20 bp, Artificial sequence
  Synthetic oligonucleotide
taataatgggaaggactgtg

SEQ ID NO: 4062 - DNA, 20 bp, Artificial sequence
  Synthetic oligonucleotide
gtaataatgggaaggactgt

SEQ ID NO: 4063 - DNA, 20 bp, Artificial sequence
  Synthetic oligonucleotide
ggtaataatgggaaggactg

SEQ ID NO: 4064 - DNA, 20 bp, Artificial sequence
  Synthetic oligonucleotide
gggtaataatgggaaggact

SEQ ID NO: 4065 - DNA, 20 bp, Artificial sequence
  Synthetic oligonucleotide
tgggtaataatgggaaggac

SEQ ID NO: 4066 - DNA, 20 bp, Artificial sequence
  Synthetic oligonucleotide
atgggtaataatgggaagga

SEQ ID NO: 4067 - DNA, 20 bp, Artificial sequence
  Synthetic oligonucleotide
tatgggtaataatgggaagg

SEQ ID NO: 4068 - DNA, 20 bp, Artificial sequence
  Synthetic oligonucleotide
atatgggtaataatgggaag

SEQ ID NO: 4069 - DNA, 20 bp, Artificial sequence
  Synthetic oligonucleotide
catatgggtaataatgggaa

SEQ ID NO: 4070 - DNA, 20 bp, Artificial sequence
  Synthetic oligonucleotide
gcatatgggtaataatggga

SEQ ID NO: 4071 - DNA, 20 bp, Artificial sequence
  Synthetic oligonucleotide
agcatatgggtaataatggg

SEQ ID NO: 4072 - DNA, 20 bp, Artificial sequence
  Synthetic oligonucleotide
tagcatatgggtaataatgg

SEQ ID NO: 4073 - DNA, 20 bp, Artificial sequence
  Synthetic oligonucleotide
atagcatatgggtaataatg

SEQ ID NO: 4074 - DNA, 20 bp, Artificial sequence
  Synthetic oligonucleotide
gatagcatatgggtaataat

SEQ ID NO: 4075 - DNA, 20 bp, Artificial sequence
  Synthetic oligonucleotide
ggatagcatatgggtaataa

SEQ ID NO: 4076 - DNA, 20 bp, Artificial sequence
  Synthetic oligonucleotide
gggatagcatatgggtaata

SEQ ID NO: 4077 - DNA, 20 bp, Artificial sequence
  Synthetic oligonucleotide
agggatagcatatgggtaat

SEQ ID NO: 4078 - DNA, 20 bp, Artificial sequence
  Synthetic oligonucleotide
aagggatagcatatgggtaa

SEQ ID NO: 4079 - DNA, 20 bp, Artificial sequence
  Synthetic oligonucleotide
taagggatagcatatgggta

SEQ ID NO: 4080 - DNA, 20 bp, Artificial sequence
  Synthetic oligonucleotide
ataagggatagcatatgggt

SEQ ID NO: 4081 - DNA, 20 bp, Artificial sequence
  Synthetic oligonucleotide
tataagggatagcatatggg

SEQ ID NO: 4082 - DNA, 20 bp, Artificial sequence
  Synthetic oligonucleotide
atataagggatagcatatgg

SEQ ID NO: 4083 - DNA, 20 bp, Artificial sequence
  Synthetic oligonucleotide
aatataagggatagcatatg

SEQ ID NO: 4084 - DNA, 20 bp, Artificial sequence
  Synthetic oligonucleotide
aaatataagggatagcatat

SEQ ID NO: 4085 - DNA, 20 bp, Artificial sequence
  Synthetic oligonucleotide
aaaatataagggatagcata

SEQ ID NO: 4086 - DNA, 20 bp, Artificial sequence
  Synthetic oligonucleotide
aaaaatataagggatagcat

SEQ ID NO: 4087 - DNA, 20 bp, Artificial sequence
  Synthetic oligonucleotide
taaaaatataagggatagca

SEQ ID NO: 4088 - DNA, 20 bp, Artificial sequence
  Synthetic oligonucleotide
ttaaaaatataagggatagc

SEQ ID NO: 4089 - DNA, 20 bp, Artificial sequence
  Synthetic oligonucleotide
ccaagtttataaatgaatga

SEQ ID NO: 4090 - DNA, 20 bp, Artificial sequence
  Synthetic oligonucleotide
accaagtttataaatgaatg

SEQ ID NO: 4091 - DNA, 20 bp, Artificial sequence
  Synthetic oligonucleotide
caccaagtttataaatgaat

SEQ ID NO: 4092 - DNA, 20 bp, Artificial sequence
  Synthetic oligonucleotide
tcaccaagtttataaatgaa

SEQ ID NO: 4093 - DNA, 20 bp, Artificial sequence
  Synthetic oligonucleotide
atcaccaagtttataaatga

SEQ ID NO: 4094 - DNA, 20 bp, Artificial sequence
  Synthetic oligonucleotide
aatcaccaagtttataaatg

SEQ ID NO: 4095 - DNA, 20 bp, Artificial sequence
  Synthetic oligonucleotide
gaatcaccaagtttataaat

SEQ ID NO: 4096 - DNA, 20 bp, Artificial sequence
  Synthetic oligonucleotide
tgaatcaccaagtttataaa

SEQ ID NO: 4097 - DNA, 20 bp, Artificial sequence
  Synthetic oligonucleotide
gtgaatcaccaagtttataa

SEQ ID NO: 4098 - DNA, 20 bp, Artificial sequence
  Synthetic oligonucleotide
atctaataaaggtgaatcac

SEQ ID NO: 4099 - DNA, 20 bp, Artificial sequence
  Synthetic oligonucleotide
aatctaataaaggtgaatca

SEQ ID NO: 4100 - DNA, 20 bp, Artificial sequence
  Synthetic oligonucleotide
gaatctaataaaggtgaatc

SEQ ID NO: 4101 - DNA, 20 bp, Artificial sequence
  Synthetic oligonucleotide
agaatctaataaaggtgaat

SEQ ID NO: 4102 - DNA, 20 bp, Artificial sequence
  Synthetic oligonucleotide
cagaatctaataaaggtgaa

SEQ ID NO: 4103 - DNA, 20 bp, Artificial sequence
  Synthetic oligonucleotide
ccagaatctaataaaggtga

SEQ ID NO: 4104 - DNA, 20 bp, Artificial sequence
  Synthetic oligonucleotide
accagaatctaataaaggtg

SEQ ID NO: 4105 - DNA, 20 bp, Artificial sequence
  Synthetic oligonucleotide
gaccagaatctaataaaggt

SEQ ID NO: 4106 - DNA, 20 bp, Artificial sequence
  Synthetic oligonucleotide
cgaccagaatctaataaagg

SEQ ID NO: 4107 - DNA, 20 bp, Artificial sequence
  Synthetic oligonucleotide
gcgaccagaatctaataaag

SEQ ID NO: 4108 - DNA, 20 bp, Artificial sequence
  Synthetic oligonucleotide
agcgaccagaatctaataaa

SEQ ID NO: 4109 - DNA, 20 bp, Artificial sequence
  Synthetic oligonucleotide
cagcgaccagaatctaataa

SEQ ID NO: 4110 - DNA, 20 bp, Artificial sequence
  Synthetic oligonucleotide
tcagcgaccagaatctaata

SEQ ID NO: 4111 - DNA, 20 bp, Artificial sequence
  Synthetic oligonucleotide
ttcagcgaccagaatctaat

SEQ ID NO: 4112 - DNA, 20 bp, Artificial sequence
  Synthetic oligonucleotide
cttcagcgaccagaatctaa

SEQ ID NO: 4113 - DNA, 20 bp, Artificial sequence
  Synthetic oligonucleotide
ccttcagcgaccagaatcta

SEQ ID NO: 4114 - DNA, 20 bp, Artificial sequence
  Synthetic oligonucleotide
gccttcagcgaccagaatct

SEQ ID NO: 4115 - DNA, 20 bp, Artificial sequence
  Synthetic oligonucleotide
gaagttactaaagccttcag

SEQ ID NO: 4116 - DNA, 20 bp, Artificial sequence
  Synthetic oligonucleotide
ctgaagttactaaagccttc

SEQ ID NO: 4117 - DNA, 20 bp, Artificial sequence
  Synthetic oligonucleotide
tctgaagttactaaagcctt

SEQ ID NO: 4118 - DNA, 20 bp, Artificial sequence
  Synthetic oligonucleotide
ctctgaagttactaaagcct

SEQ ID NO: 4119 - DNA, 20 bp, Artificial sequence
  Synthetic oligonucleotide
actctgaagttactaaagcc

SEQ ID NO: 4120 - DNA, 20 bp, Artificial sequence
  Synthetic oligonucleotide
tactctgaagttactaaagc

SEQ ID NO: 4121 - DNA, 20 bp, Artificial sequence
  Synthetic oligonucleotide
ttactctgaagttactaaag

SEQ ID NO: 4122 - DNA, 20 bp, Artificial sequence
  Synthetic oligonucleotide
tttactctgaagttactaaa

SEQ ID NO: 4123 - DNA, 20 bp, Artificial sequence
  Synthetic oligonucleotide
ttttactctgaagttactaa

SEQ ID NO: 4124 - DNA, 20 bp, Artificial sequence
  Synthetic oligonucleotide
gttttactctgaagttacta

SEQ ID NO: 4125 - DNA, 20 bp, Artificial sequence
  Synthetic oligonucleotide
agttttactctgaagttact

SEQ ID NO: 4126 - DNA, 20 bp, Artificial sequence
  Synthetic oligonucleotide
aagttttactctgaagttac

SEQ ID NO: 4127 - DNA, 20 bp, Artificial sequence
  Synthetic oligonucleotide
caagttttactctgaagtta

SEQ ID NO: 4128 - DNA, 20 bp, Artificial sequence
  Synthetic oligonucleotide
tcaagttttactctgaagtt

SEQ ID NO: 4129 - DNA, 20 bp, Artificial sequence
  Synthetic oligonucleotide
tctcaagttttactctgaag

SEQ ID NO: 4130 - DNA, 20 bp, Artificial sequence
  Synthetic oligonucleotide
ctctcaagttttactctgaa

SEQ ID NO: 4131 - DNA, 20 bp, Artificial sequence
  Synthetic oligonucleotide
tctctcaagttttactctga

SEQ ID NO: 4132 - DNA, 20 bp, Artificial sequence
  Synthetic oligonucleotide
atctctcaagttttactctg

SEQ ID NO: 4133 - DNA, 20 bp, Artificial sequence
  Synthetic oligonucleotide
catctctcaagttttactct

SEQ ID NO: 4134 - DNA, 20 bp, Artificial sequence
  Synthetic oligonucleotide
tcatctctcaagttttactc

SEQ ID NO: 4135 - DNA, 20 bp, Artificial sequence
  Synthetic oligonucleotide
ctcatctctcaagttttact

SEQ ID NO: 4136 - DNA, 20 bp, Artificial sequence
  Synthetic oligonucleotide
tctcatctctcaagttttac

SEQ ID NO: 4137 - DNA, 20 bp, Artificial sequence
  Synthetic oligonucleotide
atctcatctctcaagtttta

SEQ ID NO: 4138 - DNA, 20 bp, Artificial sequence
  Synthetic oligonucleotide
catctcatctctcaagtttt

SEQ ID NO: 4139 - DNA, 20 bp, Artificial sequence
  Synthetic oligonucleotide
acatctcatctctcaagttt

SEQ ID NO: 4140 - DNA, 20 bp, Artificial sequence
  Synthetic oligonucleotide
tacatctcatctctcaagtt

SEQ ID NO: 4141 - DNA, 20 bp, Artificial sequence
  Synthetic oligonucleotide
ttacatctcatctctcaagt

SEQ ID NO: 4142 - DNA, 20 bp, Artificial sequence
  Synthetic oligonucleotide
tttacatctcatctctcaag

SEQ ID NO: 4143 - DNA, 20 bp, Artificial sequence
  Synthetic oligonucleotide
ttttacatctcatctctcaa

SEQ ID NO: 4144 - DNA, 20 bp, Artificial sequence
  Synthetic oligonucleotide
attttacatctcatctctca

SEQ ID NO: 4145 - DNA, 20 bp, Artificial sequence
  Synthetic oligonucleotide
cattttacatctcatctctc

SEQ ID NO: 4146 - DNA, 20 bp, Artificial sequence
  Synthetic oligonucleotide
gcattttacatctcatctct

SEQ ID NO: 4147 - DNA, 20 bp, Artificial sequence
  Synthetic oligonucleotide
tgcattttacatctcatctc

SEQ ID NO: 4148 - DNA, 20 bp, Artificial sequence
  Synthetic oligonucleotide
ctgcattttacatctcatct

SEQ ID NO: 4149 - DNA, 20 bp, Artificial sequence
  Synthetic oligonucleotide
gctgcattttacatctcatc

SEQ ID NO: 4150 - DNA, 20 bp, Artificial sequence
  Synthetic oligonucleotide
ggctgcattttacatctcat

SEQ ID NO: 4151 - DNA, 20 bp, Artificial sequence
  Synthetic oligonucleotide
tggctgcattttacatctca

SEQ ID NO: 4152 - DNA, 20 bp, Artificial sequence
  Synthetic oligonucleotide
atggctgcattttacatctc

SEQ ID NO: 4153 - DNA, 20 bp, Artificial sequence
  Synthetic oligonucleotide
aatggctgcattttacatct

SEQ ID NO: 4154 - DNA, 20 bp, Artificial sequence
  Synthetic oligonucleotide
gaatggctgcattttacatc

SEQ ID NO: 4155 - DNA, 20 bp, Artificial sequence
  Synthetic oligonucleotide
agaatggctgcattttacat

SEQ ID NO: 4156 - DNA, 20 bp, Artificial sequence
  Synthetic oligonucleotide
aagaatggctgcattttaca

SEQ ID NO: 4157 - DNA, 20 bp, Artificial sequence
  Synthetic oligonucleotide
caagaatggctgcattttac

SEQ ID NO: 4158 - DNA, 20 bp, Artificial sequence
  Synthetic oligonucleotide
tcaagaatggctgcatttta

SEQ ID NO: 4159 - DNA, 20 bp, Artificial sequence
  Synthetic oligonucleotide
ctcaagaatggctgcatttt

SEQ ID NO: 4160 - DNA, 20 bp, Artificial sequence
  Synthetic oligonucleotide
tctcaagaatggctgcattt

SEQ ID NO: 4161 - DNA, 20 bp, Artificial sequence
  Synthetic oligonucleotide
ctctcaagaatggctgcatt

SEQ ID NO: 4162 - DNA, 20 bp, Artificial sequence
  Synthetic oligonucleotide
actctcaagaatggctgcat

SEQ ID NO: 4163 - DNA, 20 bp, Artificial sequence
  Synthetic oligonucleotide
aactctcaagaatggctgca

SEQ ID NO: 4164 - DNA, 20 bp, Artificial sequence
  Synthetic oligonucleotide
gaactctcaagaatggctgc

SEQ ID NO: 4165 - DNA, 20 bp, Artificial sequence
  Synthetic oligonucleotide
ggaactctcaagaatggctg

SEQ ID NO: 4166 - DNA, 20 bp, Artificial sequence
  Synthetic oligonucleotide
aggaactctcaagaatggct

SEQ ID NO: 4167 - DNA, 20 bp, Artificial sequence
  Synthetic oligonucleotide
aaggaactctcaagaatggc

SEQ ID NO: 4168 - DNA, 20 bp, Artificial sequence
  Synthetic oligonucleotide
aaaggaactctcaagaatgg

SEQ ID NO: 4169 - DNA, 20 bp, Artificial sequence
  Synthetic oligonucleotide
aaaaggaactctcaagaatg

SEQ ID NO: 4170 - DNA, 20 bp, Artificial sequence
  Synthetic oligonucleotide
aaaaaggaactctcaagaat

SEQ ID NO: 4171 - DNA, 20 bp, Artificial sequence
  Synthetic oligonucleotide
gaaaaaggaactctcaagaa

SEQ ID NO: 4172 - DNA, 20 bp, Artificial sequence
  Synthetic oligonucleotide
agaaaaaggaactctcaaga

SEQ ID NO: 4173 - DNA, 20 bp, Artificial sequence
  Synthetic oligonucleotide
cagaaaaaggaactctcaag

SEQ ID NO: 4174 - DNA, 20 bp, Artificial sequence
  Synthetic oligonucleotide
acagaaaaaggaactctcaa

SEQ ID NO: 4175 - DNA, 20 bp, Artificial sequence
  Synthetic oligonucleotide
tacagaaaaaggaactctca

SEQ ID NO: 4176 - DNA, 20 bp, Artificial sequence
  Synthetic oligonucleotide
ttacagaaaaaggaactctc

SEQ ID NO: 4177 - DNA, 20 bp, Artificial sequence
  Synthetic oligonucleotide
gttacagaaaaaggaactct

SEQ ID NO: 4178 - DNA, 20 bp, Artificial sequence
  Synthetic oligonucleotide
tgttacagaaaaaggaactc

SEQ ID NO: 4179 - DNA, 20 bp, Artificial sequence
  Synthetic oligonucleotide
aatgttacagaaaaaggaac

SEQ ID NO: 4180 - DNA, 20 bp, Artificial sequence
  Synthetic oligonucleotide
gaatgttacagaaaaaggaa

SEQ ID NO: 4181 - DNA, 20 bp, Artificial sequence
  Synthetic oligonucleotide
tgaatgttacagaaaaagga

SEQ ID NO: 4182 - DNA, 20 bp, Artificial sequence
  Synthetic oligonucleotide
atgaatgttacagaaaaagg

SEQ ID NO: 4183 - DNA, 20 bp, Artificial sequence
  Synthetic oligonucleotide
gatgaatgttacagaaaaag

SEQ ID NO: 4184 - DNA, 20 bp, Artificial sequence
  Synthetic oligonucleotide
tgatgaatgttacagaaaaa

SEQ ID NO: 4185 - DNA, 20 bp, Artificial sequence
  Synthetic oligonucleotide
ttgatgaatgttacagaaaa

SEQ ID NO: 4186 - DNA, 20 bp, Artificial sequence
  Synthetic oligonucleotide
gttgatgaatgttacagaaa

SEQ ID NO: 4187 - DNA, 20 bp, Artificial sequence
  Synthetic oligonucleotide
tgttgatgaatgttacagaa

SEQ ID NO: 4188 - DNA, 20 bp, Artificial sequence
  Synthetic oligonucleotide
gtgttgatgaatgttacaga

SEQ ID NO: 4189 - DNA, 20 bp, Artificial sequence
  Synthetic oligonucleotide
agtgttgatgaatgttacag

SEQ ID NO: 4190 - DNA, 20 bp, Artificial sequence
  Synthetic oligonucleotide
aagtgttgatgaatgttaca

SEQ ID NO: 4191 - DNA, 20 bp, Artificial sequence
  Synthetic oligonucleotide
gaagtgttgatgaatgttac

SEQ ID NO: 4192 - DNA, 20 bp, Artificial sequence
  Synthetic oligonucleotide
tgaagtgttgatgaatgtta

SEQ ID NO: 4193 - DNA, 20 bp, Artificial sequence
  Synthetic oligonucleotide
atgaagtgttgatgaatgtt

SEQ ID NO: 4194 - DNA, 20 bp, Artificial sequence
  Synthetic oligonucleotide
aatgaagtgttgatgaatgt

SEQ ID NO: 4195 - DNA, 20 bp, Artificial sequence
  Synthetic oligonucleotide
caatgaagtgttgatgaatg

SEQ ID NO: 4196 - DNA, 20 bp, Artificial sequence
  Synthetic oligonucleotide
tcaatgaagtgttgatgaat

SEQ ID NO: 4197 - DNA, 20 bp, Artificial sequence
  Synthetic oligonucleotide
ctcaatgaagtgttgatgaa

SEQ ID NO: 4198 - DNA, 20 bp, Artificial sequence
  Synthetic oligonucleotide
tctcaatgaagtgttgatga

SEQ ID NO: 4199 - DNA, 20 bp, Artificial sequence
  Synthetic oligonucleotide
ttctcaatgaagtgttgatg

SEQ ID NO: 4200 - DNA, 20 bp, Artificial sequence
  Synthetic oligonucleotide
aaccttcacttctcaatgaa

SEQ ID NO: 4201 - DNA, 20 bp, Artificial sequence
  Synthetic oligonucleotide
gaaccttcacttctcaatga

SEQ ID NO: 4202 - DNA, 20 bp, Artificial sequence
  Synthetic oligonucleotide
ggaaccttcacttctcaatg

SEQ ID NO: 4203 - DNA, 20 bp, Artificial sequence
  Synthetic oligonucleotide
aggaaccttcacttctcaat

SEQ ID NO: 4204 - DNA, 20 bp, Artificial sequence
  Synthetic oligonucleotide
taggaaccttcacttctcaa

SEQ ID NO: 4205 - DNA, 20 bp, Artificial sequence
  Synthetic oligonucleotide
ataggaaccttcacttctca

SEQ ID NO: 4206 - DNA, 20 bp, Artificial sequence
  Synthetic oligonucleotide
cataggaaccttcacttctc

SEQ ID NO: 4207 - DNA, 20 bp, Artificial sequence
  Synthetic oligonucleotide
ccataggaaccttcacttct

SEQ ID NO: 4208 - DNA, 20 bp, Artificial sequence
  Synthetic oligonucleotide
gccataggaaccttcacttc

SEQ ID NO: 4209 - DNA, 20 bp, Artificial sequence
  Synthetic oligonucleotide
agccataggaaccttcactt

SEQ ID NO: 4210 - DNA, 20 bp, Artificial sequence
  Synthetic oligonucleotide
cagccataggaaccttcact

SEQ ID NO: 4211 - DNA, 20 bp, Artificial sequence
  Synthetic oligonucleotide
acagccataggaaccttcac

SEQ ID NO: 4212 - DNA, 20 bp, Artificial sequence
  Synthetic oligonucleotide
gacagccataggaaccttca

SEQ ID NO: 4213 - DNA, 20 bp, Artificial sequence
  Synthetic oligonucleotide
agacagccataggaaccttc

SEQ ID NO: 4214 - DNA, 20 bp, Artificial sequence
  Synthetic oligonucleotide
gagacagccataggaacctt

SEQ ID NO: 4215 - DNA, 20 bp, Artificial sequence
  Synthetic oligonucleotide
agagacagccataggaacct

SEQ ID NO: 4216 - DNA, 20 bp, Artificial sequence
  Synthetic oligonucleotide
tagagacagccataggaacc

SEQ ID NO: 4217 - DNA, 20 bp, Artificial sequence
  Synthetic oligonucleotide
gtagagacagccataggaac

SEQ ID NO: 4218 - DNA, 20 bp, Artificial sequence
  Synthetic oligonucleotide
ggtagagacagccataggaa

SEQ ID NO: 4219 - DNA, 20 bp, Artificial sequence
  Synthetic oligonucleotide
aggtagagacagccatagga

SEQ ID NO: 4220 - DNA, 20 bp, Artificial sequence
  Synthetic oligonucleotide
aaggtagagacagccatagg

SEQ ID NO: 4221 - DNA, 20 bp, Artificial sequence
  Synthetic oligonucleotide
gaaggtagagacagccatag

SEQ ID NO: 4222 - DNA, 20 bp, Artificial sequence
  Synthetic oligonucleotide
tgaaggtagagacagccata

SEQ ID NO: 4223 - DNA, 20 bp, Artificial sequence
  Synthetic oligonucleotide
ttgaaggtagagacagccat

SEQ ID NO: 4224 - DNA, 20 bp, Artificial sequence
  Synthetic oligonucleotide
cttgaaggtagagacagcca

SEQ ID NO: 4225 - DNA, 20 bp, Artificial sequence
  Synthetic oligonucleotide
tcttgaaggtagagacagcc

SEQ ID NO: 4226 - DNA, 20 bp, Artificial sequence
  Synthetic oligonucleotide
taaagctaagcctcttgaag

SEQ ID NO: 4227 - DNA, 20 bp, Artificial sequence
  Synthetic oligonucleotide
ctaaagctaagcctcttgaa

SEQ ID NO: 4228 - DNA, 20 bp, Artificial sequence
  Synthetic oligonucleotide
actaaagctaagcctcttga

SEQ ID NO: 4229 - DNA, 20 bp, Artificial sequence
  Synthetic oligonucleotide
gactaaagctaagcctcttg

SEQ ID NO: 4230 - DNA, 20 bp, Artificial sequence
  Synthetic oligonucleotide
tgactaaagctaagcctctt

SEQ ID NO: 4231 - DNA, 20 bp, Artificial sequence
  Synthetic oligonucleotide
gtgactaaagctaagcctct

SEQ ID NO: 4232 - DNA, 20 bp, Artificial sequence
  Synthetic oligonucleotide
agtgactaaagctaagcctc

SEQ ID NO: 4233 - DNA, 20 bp, Artificial sequence
  Synthetic oligonucleotide
cagtgactaaagctaagcct

SEQ ID NO: 4234 - DNA, 20 bp, Artificial sequence
  Synthetic oligonucleotide
tcagtgactaaagctaagcc

SEQ ID NO: 4235 - DNA, 20 bp, Artificial sequence
  Synthetic oligonucleotide
ctcagtgactaaagctaagc

SEQ ID NO: 4236 - DNA, 20 bp, Artificial sequence
  Synthetic oligonucleotide
tctcagtgactaaagctaag

SEQ ID NO: 4237 - DNA, 20 bp, Artificial sequence
  Synthetic oligonucleotide
ttctcagtgactaaagctaa

SEQ ID NO: 4238 - DNA, 20 bp, Artificial sequence
  Synthetic oligonucleotide
tttctcagtgactaaagcta

SEQ ID NO: 4239 - DNA, 20 bp, Artificial sequence
  Synthetic oligonucleotide
ctttctcagtgactaaagct

SEQ ID NO: 4240 - DNA, 20 bp, Artificial sequence
  Synthetic oligonucleotide
tctttctcagtgactaaagc

SEQ ID NO: 4241 - DNA, 20 bp, Artificial sequence
  Synthetic oligonucleotide
gtctttctcagtgactaaag

SEQ ID NO: 4242 - DNA, 20 bp, Artificial sequence
  Synthetic oligonucleotide
tgtctttctcagtgactaaa

SEQ ID NO: 4243 - DNA, 20 bp, Artificial sequence
  Synthetic oligonucleotide
ttgtctttctcagtgactaa

SEQ ID NO: 4244 - DNA, 20 bp, Artificial sequence
  Synthetic oligonucleotide
cttgtctttctcagtgacta

SEQ ID NO: 4245 - DNA, 20 bp, Artificial sequence
  Synthetic oligonucleotide
ccttgtctttctcagtgact

SEQ ID NO: 4246 - DNA, 20 bp, Artificial sequence
  Synthetic oligonucleotide
tccttgtctttctcagtgac

SEQ ID NO: 4247 - DNA, 20 bp, Artificial sequence
  Synthetic oligonucleotide
ttccttgtctttctcagtga

SEQ ID NO: 4248 - DNA, 20 bp, Artificial sequence
  Synthetic oligonucleotide
tttccttgtctttctcagtg

SEQ ID NO: 4249 - DNA, 20 bp, Artificial sequence
  Synthetic oligonucleotide
gtttccttgtctttctcagt

SEQ ID NO: 4250 - DNA, 20 bp, Artificial sequence
  Synthetic oligonucleotide
agtttccttgtctttctcag

SEQ ID NO: 4251 - DNA, 20 bp, Artificial sequence
  Synthetic oligonucleotide
tagtttccttgtctttctca

SEQ ID NO: 4252 - DNA, 20 bp, Artificial sequence
  Synthetic oligonucleotide
ttagtttccttgtctttctc

SEQ ID NO: 4253 - DNA, 20 bp, Artificial sequence
  Synthetic oligonucleotide
attagtttccttgtctttct

SEQ ID NO: 4254 - DNA, 20 bp, Artificial sequence
  Synthetic oligonucleotide
cattagtttccttgtctttc

SEQ ID NO: 4255 - DNA, 20 bp, Artificial sequence
  Synthetic oligonucleotide
tcattagtttccttgtcttt

SEQ ID NO: 4256 - DNA, 20 bp, Artificial sequence
  Synthetic oligonucleotide
atcattagtttccttgtctt

SEQ ID NO: 4257 - DNA, 20 bp, Artificial sequence
  Synthetic oligonucleotide
tatcattagtttccttgtct

SEQ ID NO: 4258 - DNA, 20 bp, Artificial sequence
  Synthetic oligonucleotide
ctatcattagtttccttgtc

SEQ ID NO: 4259 - DNA, 20 bp, Artificial sequence
  Synthetic oligonucleotide
tctatcattagtttccttgt

SEQ ID NO: 4260 - DNA, 20 bp, Artificial sequence
  Synthetic oligonucleotide
ttctatcattagtttccttg

SEQ ID NO: 4261 - DNA, 20 bp, Artificial sequence
  Synthetic oligonucleotide
attctatcattagtttcctt

SEQ ID NO: 4262 - DNA, 20 bp, Artificial sequence
  Synthetic oligonucleotide
tattctatcattagtttcct

SEQ ID NO: 4263 - DNA, 20 bp, Artificial sequence
  Synthetic oligonucleotide
atattctatcattagtttcc

SEQ ID NO: 4264 - DNA, 20 bp, Artificial sequence
  Synthetic oligonucleotide
ctactatattctatcattag

SEQ ID NO: 4265 - DNA, 20 bp, Artificial sequence
  Synthetic oligonucleotide
gctactatattctatcatta

SEQ ID NO: 4266 - DNA, 20 bp, Artificial sequence
  Synthetic oligonucleotide
agctactatattctatcatt

SEQ ID NO: 4267 - DNA, 20 bp, Artificial sequence
  Synthetic oligonucleotide
aagctactatattctatcat

SEQ ID NO: 4268 - DNA, 20 bp, Artificial sequence
  Synthetic oligonucleotide
gaagctactatattctatca

SEQ ID NO: 4269 - DNA, 20 bp, Artificial sequence
  Synthetic oligonucleotide
agaagctactatattctatc

SEQ ID NO: 4270 - DNA, 20 bp, Artificial sequence
  Synthetic oligonucleotide
aagaagctactatattctat

SEQ ID NO: 4271 - DNA, 20 bp, Artificial sequence
  Synthetic oligonucleotide
gaagaagctactatattcta

SEQ ID NO: 4272 - DNA, 20 bp, Artificial sequence
  Synthetic oligonucleotide
agaagaagctactatattct

SEQ ID NO: 4273 - DNA, 20 bp, Artificial sequence
  Synthetic oligonucleotide
cagaagaagctactatattc

SEQ ID NO: 4274 - DNA, 20 bp, Artificial sequence
  Synthetic oligonucleotide
ccagaagaagctactatatt

SEQ ID NO: 4275 - DNA, 20 bp, Artificial sequence
  Synthetic oligonucleotide
gccagaagaagctactatat

SEQ ID NO: 4276 - DNA, 20 bp, Artificial sequence
  Synthetic oligonucleotide
cgccagaagaagctactata

SEQ ID NO: 4277 - DNA, 20 bp, Artificial sequence
  Synthetic oligonucleotide
acgccagaagaagctactat

SEQ ID NO: 4278 - DNA, 20 bp, Artificial sequence
  Synthetic oligonucleotide
aacgccagaagaagctacta

SEQ ID NO: 4279 - DNA, 20 bp, Artificial sequence
  Synthetic oligonucleotide
taacgccagaagaagctact

SEQ ID NO: 4280 - DNA, 20 bp, Artificial sequence
  Synthetic oligonucleotide
ctaacgccagaagaagctac

SEQ ID NO: 4281 - DNA, 20 bp, Artificial sequence
  Synthetic oligonucleotide
cctaacgccagaagaagcta

SEQ ID NO: 4282 - DNA, 20 bp, Artificial sequence
  Synthetic oligonucleotide
acctaacgccagaagaagct

SEQ ID NO: 4283 - DNA, 20 bp, Artificial sequence
  Synthetic oligonucleotide
tacctaacgccagaagaagc

SEQ ID NO: 4284 - DNA, 20 bp, Artificial sequence
  Synthetic oligonucleotide
atacctaacgccagaagaag

SEQ ID NO: 4285 - DNA, 20 bp, Artificial sequence
  Synthetic oligonucleotide
gatacctaacgccagaagaa

SEQ ID NO: 4286 - DNA, 20 bp, Artificial sequence
  Synthetic oligonucleotide
tgatacctaacgccagaaga

SEQ ID NO: 4287 - DNA, 20 bp, Artificial sequence
  Synthetic oligonucleotide
gtgatacctaacgccagaag

SEQ ID NO: 4288 - DNA, 20 bp, Artificial sequence
  Synthetic oligonucleotide
tgtgatacctaacgccagaa

SEQ ID NO: 4289 - DNA, 20 bp, Artificial sequence
  Synthetic oligonucleotide
ctgtgatacctaacgccaga

SEQ ID NO: 4290 - DNA, 20 bp, Artificial sequence
  Synthetic oligonucleotide
tctgtgatacctaacgccag

SEQ ID NO: 4291 - DNA, 20 bp, Artificial sequence
  Synthetic oligonucleotide
ctctgtgatacctaacgcca

SEQ ID NO: 4292 - DNA, 20 bp, Artificial sequence
  Synthetic oligonucleotide
actctgtgatacctaacgcc

SEQ ID NO: 4293 - DNA, 20 bp, Artificial sequence
  Synthetic oligonucleotide
gactctgtgatacctaacgc

SEQ ID NO: 4294 - DNA, 20 bp, Artificial sequence
  Synthetic oligonucleotide
tgactctgtgatacctaacg

SEQ ID NO: 4295 - DNA, 20 bp, Artificial sequence
  Synthetic oligonucleotide
gtgactctgtgatacctaac

SEQ ID NO: 4296 - DNA, 20 bp, Artificial sequence
  Synthetic oligonucleotide
tgtgactctgtgatacctaa

SEQ ID NO: 4297 - DNA, 20 bp, Artificial sequence
  Synthetic oligonucleotide
ctgtgactctgtgataccta

SEQ ID NO: 4298 - DNA, 20 bp, Artificial sequence
  Synthetic oligonucleotide
gctgtgactctgtgatacct

SEQ ID NO: 4299 - DNA, 20 bp, Artificial sequence
  Synthetic oligonucleotide
agctgtgactctgtgatacc

SEQ ID NO: 4300 - DNA, 20 bp, Artificial sequence
  Synthetic oligonucleotide
tagctgtgactctgtgatac

SEQ ID NO: 4301 - DNA, 20 bp, Artificial sequence
  Synthetic oligonucleotide
ctagctgtgactctgtgata

SEQ ID NO: 4302 - DNA, 20 bp, Artificial sequence
  Synthetic oligonucleotide
actagctgtgactctgtgat

SEQ ID NO: 4303 - DNA, 20 bp, Artificial sequence
  Synthetic oligonucleotide
aactagctgtgactctgtga

SEQ ID NO: 4304 - DNA, 20 bp, Artificial sequence
  Synthetic oligonucleotide
taactagctgtgactctgtg

SEQ ID NO: 4305 - DNA, 20 bp, Artificial sequence
  Synthetic oligonucleotide
gtaactagctgtgactctgt

SEQ ID NO: 4306 - DNA, 20 bp, Artificial sequence
  Synthetic oligonucleotide
tgtaactagctgtgactctg

SEQ ID NO: 4307 - DNA, 20 bp, Artificial sequence
  Synthetic oligonucleotide
ctgtaactagctgtgactct

SEQ ID NO: 4308 - DNA, 20 bp, Artificial sequence
  Synthetic oligonucleotide
taaagggctagctgtaacta

SEQ ID NO: 4309 - DNA, 20 bp, Artificial sequence
  Synthetic oligonucleotide
ataaagggctagctgtaact

SEQ ID NO: 4310 - DNA, 20 bp, Artificial sequence
  Synthetic oligonucleotide
aataaagggctagctgtaac

SEQ ID NO: 4311 - DNA, 20 bp, Artificial sequence
  Synthetic oligonucleotide
taataaagggctagctgtaa

SEQ ID NO: 4312 - DNA, 20 bp, Artificial sequence
  Synthetic oligonucleotide
ataataaagggctagctgta

SEQ ID NO: 4313 - DNA, 20 bp, Artificial sequence
  Synthetic oligonucleotide
aataataaagggctagctgt

SEQ ID NO: 4314 - DNA, 20 bp, Artificial sequence
  Synthetic oligonucleotide
caataataaagggctagctg

SEQ ID NO: 4315 - DNA, 20 bp, Artificial sequence
  Synthetic oligonucleotide
tcaataataaagggctagct

SEQ ID NO: 4316 - DNA, 20 bp, Artificial sequence
  Synthetic oligonucleotide
ttcaataataaagggctagc

SEQ ID NO: 4317 - DNA, 20 bp, Artificial sequence
  Synthetic oligonucleotide
tttcaataataaagggctag

SEQ ID NO: 4318 - DNA, 20 bp, Artificial sequence
  Synthetic oligonucleotide
ctttcaataataaagggcta

SEQ ID NO: 4319 - DNA, 20 bp, Artificial sequence
  Synthetic oligonucleotide
tctttcaataataaagggct

SEQ ID NO: 4320 - DNA, 20 bp, Artificial sequence
  Synthetic oligonucleotide
ttctttcaataataaagggc

SEQ ID NO: 4321 - DNA, 20 bp, Artificial sequence
  Synthetic oligonucleotide
cttctttcaataataaaggg

SEQ ID NO: 4322 - DNA, 20 bp, Artificial sequence
  Synthetic oligonucleotide
tcttctttcaataataaagg

SEQ ID NO: 4323 - DNA, 20 bp, Artificial sequence
  Synthetic oligonucleotide
ctcttctttcaataataaag

SEQ ID NO: 4324 - DNA, 20 bp, Artificial sequence
  Synthetic oligonucleotide
cctcttctttcaataataaa

SEQ ID NO: 4325 - DNA, 20 bp, Artificial sequence
  Synthetic oligonucleotide
tcctcttctttcaataataa

SEQ ID NO: 4326 - DNA, 20 bp, Artificial sequence
  Synthetic oligonucleotide
ctcctcttctttcaataata

SEQ ID NO: 4327 - DNA, 20 bp, Artificial sequence
  Synthetic oligonucleotide
gctcctcttctttcaataat

SEQ ID NO: 4328 - DNA, 20 bp, Artificial sequence
  Synthetic oligonucleotide
agctcctcttctttcaataa

SEQ ID NO: 4329 - DNA, 20 bp, Artificial sequence
  Synthetic oligonucleotide
tagctcctcttctttcaata

SEQ ID NO: 4330 - DNA, 20 bp, Artificial sequence
  Synthetic oligonucleotide
ctagctcctcttctttcaat

SEQ ID NO: 4331 - DNA, 20 bp, Artificial sequence
  Synthetic oligonucleotide
gctagctcctcttctttcaa

SEQ ID NO: 4332 - DNA, 20 bp, Artificial sequence
  Synthetic oligonucleotide
tgctagctcctcttctttca

SEQ ID NO: 4333 - DNA, 20 bp, Artificial sequence
  Synthetic oligonucleotide
ctgctagctcctcttctttc

SEQ ID NO: 4334 - DNA, 20 bp, Artificial sequence
  Synthetic oligonucleotide
actgctagctcctcttcttt

SEQ ID NO: 4335 - DNA, 20 bp, Artificial sequence
  Synthetic oligonucleotide
gactgctagctcctcttctt

SEQ ID NO: 4336 - DNA, 20 bp, Artificial sequence
  Synthetic oligonucleotide
ggactgctagctcctcttct

SEQ ID NO: 4337 - DNA, 20 bp, Artificial sequence
  Synthetic oligonucleotide
tgggactgctagctcctctt

SEQ ID NO: 4338 - DNA, 20 bp, Artificial sequence
  Synthetic oligonucleotide
tagtgggactgctagctcct

SEQ ID NO: 4339 - DNA, 20 bp, Artificial sequence
  Synthetic oligonucleotide
atagtgggactgctagctcc

SEQ ID NO: 4340 - DNA, 20 bp, Artificial sequence
  Synthetic oligonucleotide
gatagtgggactgctagctc

SEQ ID NO: 4341 - DNA, 20 bp, Artificial sequence
  Synthetic oligonucleotide
tgatagtgggactgctagct

SEQ ID NO: 4342 - DNA, 20 bp, Artificial sequence
  Synthetic oligonucleotide
ctgatagtgggactgctagc

SEQ ID NO: 4343 - DNA, 20 bp, Artificial sequence
  Synthetic oligonucleotide
tctgatagtgggactgctag

SEQ ID NO: 4344 - DNA, 20 bp, Artificial sequence
  Synthetic oligonucleotide
ttctgatagtgggactgcta

SEQ ID NO: 4345 - DNA, 20 bp, Artificial sequence
  Synthetic oligonucleotide
attctgatagtgggactgct

SEQ ID NO: 4346 - DNA, 20 bp, Artificial sequence
  Synthetic oligonucleotide
aattctgatagtgggactgc

SEQ ID NO: 4347 - DNA, 20 bp, Artificial sequence
  Synthetic oligonucleotide
taattctgatagtgggactg

SEQ ID NO: 4348 - DNA, 20 bp, Artificial sequence
  Synthetic oligonucleotide
ttaattctgatagtgggact

SEQ ID NO: 4349 - DNA, 20 bp, Artificial sequence
  Synthetic oligonucleotide
cttaattctgatagtgggac

SEQ ID NO: 4350 - DNA, 20 bp, Artificial sequence
  Synthetic oligonucleotide
tcttaattctgatagtggga

SEQ ID NO: 4351 - DNA, 20 bp, Artificial sequence
  Synthetic oligonucleotide
gtcttaattctgatagtggg

SEQ ID NO: 4352 - DNA, 20 bp, Artificial sequence
  Synthetic oligonucleotide
agtcttaattctgatagtgg

SEQ ID NO: 4353 - DNA, 20 bp, Artificial sequence
  Synthetic oligonucleotide
tagtcttaattctgatagtg

SEQ ID NO: 4354 - DNA, 20 bp, Artificial sequence
  Synthetic oligonucleotide
ctagtcttaattctgatagt

SEQ ID NO: 4355 - DNA, 20 bp, Artificial sequence
  Synthetic oligonucleotide
tctagtcttaattctgatag

SEQ ID NO: 4356 - DNA, 20 bp, Artificial sequence
  Synthetic oligonucleotide
ctctagtcttaattctgata

SEQ ID NO: 4357 - DNA, 20 bp, Artificial sequence
  Synthetic oligonucleotide
tctctagtcttaattctgat

SEQ ID NO: 4358 - DNA, 20 bp, Artificial sequence
  Synthetic oligonucleotide
atctctagtcttaattctga

SEQ ID NO: 4359 - DNA, 20 bp, Artificial sequence
  Synthetic oligonucleotide
catctctagtcttaattctg

SEQ ID NO: 4360 - DNA, 20 bp, Artificial sequence
  Synthetic oligonucleotide
ccatctctagtcttaattct

SEQ ID NO: 4361 - DNA, 20 bp, Artificial sequence
  Synthetic oligonucleotide
accatctctagtcttaattc

SEQ ID NO: 4362 - DNA, 20 bp, Artificial sequence
  Synthetic oligonucleotide
taccatctctagtcttaatt

SEQ ID NO: 4363 - DNA, 20 bp, Artificial sequence
  Synthetic oligonucleotide
ttaccatctctagtcttaat

SEQ ID NO: 4364 - DNA, 20 bp, Artificial sequence
  Synthetic oligonucleotide
attaccatctctagtcttaa

SEQ ID NO: 4365 - DNA, 20 bp, Artificial sequence
  Synthetic oligonucleotide
tattaccatctctagtctta

SEQ ID NO: 4366 - DNA, 20 bp, Artificial sequence
  Synthetic oligonucleotide
ctattaccatctctagtctt

SEQ ID NO: 4367 - DNA, 20 bp, Artificial sequence
  Synthetic oligonucleotide
cctattaccatctctagtct

SEQ ID NO: 4368 - DNA, 20 bp, Artificial sequence
  Synthetic oligonucleotide
tcctattaccatctctagtc

SEQ ID NO: 4369 - DNA, 20 bp, Artificial sequence
  Synthetic oligonucleotide
ctcctattaccatctctagt

SEQ ID NO: 4370 - DNA, 20 bp, Artificial sequence
  Synthetic oligonucleotide
gctcctattaccatctctag

SEQ ID NO: 4371 - DNA, 20 bp, Artificial sequence
  Synthetic oligonucleotide
agctcctattaccatctcta

SEQ ID NO: 4372 - DNA, 20 bp, Artificial sequence
  Synthetic oligonucleotide
tagctcctattaccatctct

SEQ ID NO: 4373 - DNA, 20 bp, Artificial sequence
  Synthetic oligonucleotide
ctagctcctattaccatctc

SEQ ID NO: 4374 - DNA, 20 bp, Artificial sequence
  Synthetic oligonucleotide
actagctcctattaccatct

SEQ ID NO: 4375 - DNA, 20 bp, Artificial sequence
  Synthetic oligonucleotide
tactagctcctattaccatc

SEQ ID NO: 4376 - DNA, 20 bp, Artificial sequence
  Synthetic oligonucleotide
atactagctcctattaccat

SEQ ID NO: 4377 - DNA, 20 bp, Artificial sequence
  Synthetic oligonucleotide
gatactagctcctattacca

SEQ ID NO: 4378 - DNA, 20 bp, Artificial sequence
  Synthetic oligonucleotide
tgatactagctcctattacc

SEQ ID NO: 4379 - DNA, 20 bp, Artificial sequence
  Synthetic oligonucleotide
ctgatactagctcctattac

SEQ ID NO: 4380 - DNA, 20 bp, Artificial sequence
  Synthetic oligonucleotide
tctgatactagctcctatta

SEQ ID NO: 4381 - DNA, 20 bp, Artificial sequence
  Synthetic oligonucleotide
ttctgatactagctcctatt

SEQ ID NO: 4382 - DNA, 20 bp, Artificial sequence
  Synthetic oligonucleotide
tttctgatactagctcctat

SEQ ID NO: 4383 - DNA, 20 bp, Artificial sequence
  Synthetic oligonucleotide
ttttctgatactagctccta

SEQ ID NO: 4384 - DNA, 20 bp, Artificial sequence
  Synthetic oligonucleotide
cttttctgatactagctcct

SEQ ID NO: 4385 - DNA, 20 bp, Artificial sequence
  Synthetic oligonucleotide
gcttttctgatactagctcc

SEQ ID NO: 4386 - DNA, 20 bp, Artificial sequence
  Synthetic oligonucleotide
agcttttctgatactagctc

SEQ ID NO: 4387 - DNA, 20 bp, Artificial sequence
  Synthetic oligonucleotide
taagcttttctgatactagc

SEQ ID NO: 4388 - DNA, 20 bp, Artificial sequence
  Synthetic oligonucleotide
ttaagcttttctgatactag

SEQ ID NO: 4389 - DNA, 20 bp, Artificial sequence
  Synthetic oligonucleotide
cttaagcttttctgatacta

SEQ ID NO: 4390 - DNA, 20 bp, Artificial sequence
  Synthetic oligonucleotide
ccttaagcttttctgatact

SEQ ID NO: 4391 - DNA, 20 bp, Artificial sequence
  Synthetic oligonucleotide
actttatgctttgccttaag

SEQ ID NO: 4392 - DNA, 20 bp, Artificial sequence
  Synthetic oligonucleotide
cactttatgctttgccttaa

SEQ ID NO: 4393 - DNA, 20 bp, Artificial sequence
  Synthetic oligonucleotide
acactttatgctttgcctta

SEQ ID NO: 4394 - DNA, 20 bp, Artificial sequence
  Synthetic oligonucleotide
tacactttatgctttgcctt

SEQ ID NO: 4395 - DNA, 20 bp, Artificial sequence
  Synthetic oligonucleotide
ctacactttatgctttgcct

SEQ ID NO: 4396 - DNA, 20 bp, Artificial sequence
  Synthetic oligonucleotide
cctacactttatgctttgcc

SEQ ID NO: 4397 - DNA, 20 bp, Artificial sequence
  Synthetic oligonucleotide
gcctacactttatgctttgc

SEQ ID NO: 4398 - DNA, 20 bp, Artificial sequence
  Synthetic oligonucleotide
agcctacactttatgctttg

SEQ ID NO: 4399 - DNA, 20 bp, Artificial sequence
  Synthetic oligonucleotide
tagcctacactttatgcttt

SEQ ID NO: 4400 - DNA, 20 bp, Artificial sequence
  Synthetic oligonucleotide
ctagcctacactttatgctt

SEQ ID NO: 4401 - DNA, 20 bp, Artificial sequence
  Synthetic oligonucleotide
tctagcctacactttatgct

SEQ ID NO: 4402 - DNA, 20 bp, Artificial sequence
  Synthetic oligonucleotide
ttctagcctacactttatgc

SEQ ID NO: 4403 - DNA, 20 bp, Artificial sequence
  Synthetic oligonucleotide
attctagcctacactttatg

SEQ ID NO: 4404 - DNA, 20 bp, Artificial sequence
  Synthetic oligonucleotide
cattctagcctacactttat

SEQ ID NO: 4405 - DNA, 20 bp, Artificial sequence
  Synthetic oligonucleotide
tcattctagcctacacttta

SEQ ID NO: 4406 - DNA, 20 bp, Artificial sequence
  Synthetic oligonucleotide
ttcattctagcctacacttt

SEQ ID NO: 4407 - DNA, 20 bp, Artificial sequence
  Synthetic oligonucleotide
cttcattctagcctacactt

SEQ ID NO: 4408 - DNA, 20 bp, Artificial sequence
  Synthetic oligonucleotide
gcttcattctagcctacact

SEQ ID NO: 4409 - DNA, 20 bp, Artificial sequence
  Synthetic oligonucleotide
attctccagcttcattctag

SEQ ID NO: 4410 - DNA, 20 bp, Artificial sequence
  Synthetic oligonucleotide
cattctccagcttcattcta

SEQ ID NO: 4411 - DNA, 20 bp, Artificial sequence
  Synthetic oligonucleotide
ccattctccagcttcattct

SEQ ID NO: 4412 - DNA, 20 bp, Artificial sequence
  Synthetic oligonucleotide
cccattctccagcttcattc

SEQ ID NO: 4413 - DNA, 20 bp, Artificial sequence
  Synthetic oligonucleotide
ccccattctccagcttcatt

SEQ ID NO: 4414 - DNA, 20 bp, Artificial sequence
  Synthetic oligonucleotide
tccccattctccagcttcat

SEQ ID NO: 4415 - DNA, 20 bp, Artificial sequence
  Synthetic oligonucleotide
ctccccattctccagcttca

SEQ ID NO: 4416 - DNA, 20 bp, Artificial sequence
  Synthetic oligonucleotide
tctggatgttacccaagccc

SEQ ID NO: 4417 - DNA, 20 bp, Artificial sequence
  Synthetic oligonucleotide
ttctggatgttacccaagcc

SEQ ID NO: 4418 - DNA, 20 bp, Artificial sequence
  Synthetic oligonucleotide
gttctggatgttacccaagc

SEQ ID NO: 4419 - DNA, 20 bp, Artificial sequence
  Synthetic oligonucleotide
ggttctggatgttacccaag

SEQ ID NO: 4420 - DNA, 20 bp, Artificial sequence
  Synthetic oligonucleotide
aggttctggatgttacccaa

SEQ ID NO: 4421 - DNA, 20 bp, Artificial sequence
  Synthetic oligonucleotide
caggttctggatgttaccca

SEQ ID NO: 4422 - DNA, 20 bp, Artificial sequence
  Synthetic oligonucleotide
atgtagttccaggtccccag

SEQ ID NO: 4423 - DNA, 20 bp, Artificial sequence
  Synthetic oligonucleotide
catgtagttccaggtcccca

SEQ ID NO: 4424 - DNA, 20 bp, Artificial sequence
  Synthetic oligonucleotide
tcatgtagttccaggtcccc

SEQ ID NO: 4425 - DNA, 20 bp, Artificial sequence
  Synthetic oligonucleotide
ctcatgtagttccaggtccc

SEQ ID NO: 4426 - DNA, 20 bp, Artificial sequence
  Synthetic oligonucleotide
tctcatgtagttccaggtcc

SEQ ID NO: 4427 - DNA, 20 bp, Artificial sequence
  Synthetic oligonucleotide
atctcatgtagttccaggtc

SEQ ID NO: 4428 - DNA, 20 bp, Artificial sequence
  Synthetic oligonucleotide
catctcatgtagttccaggt

SEQ ID NO: 4429 - DNA, 20 bp, Artificial sequence
  Synthetic oligonucleotide
ctccattcttacatctcatg

SEQ ID NO: 4430 - DNA, 20 bp, Artificial sequence
  Synthetic oligonucleotide
tctccattcttacatctcat

SEQ ID NO: 4431 - DNA, 20 bp, Artificial sequence
  Synthetic oligonucleotide
ctctccattcttacatctca

SEQ ID NO: 4432 - DNA, 20 bp, Artificial sequence
  Synthetic oligonucleotide
cctctccattcttacatctc

SEQ ID NO: 4433 - DNA, 20 bp, Artificial sequence
  Synthetic oligonucleotide
acctctccattcttacatct

SEQ ID NO: 4434 - DNA, 20 bp, Artificial sequence
  Synthetic oligonucleotide
aacctctccattcttacatc

SEQ ID NO: 4435 - DNA, 20 bp, Artificial sequence
  Synthetic oligonucleotide
gaacctctccattcttacat

SEQ ID NO: 4436 - DNA, 20 bp, Artificial sequence
  Synthetic oligonucleotide
agaacctctccattcttaca

SEQ ID NO: 4437 - DNA, 20 bp, Artificial sequence
  Synthetic oligonucleotide
tagaacctctccattcttac

SEQ ID NO: 4438 - DNA, 20 bp, Artificial sequence
  Synthetic oligonucleotide
ctagaacctctccattctta

SEQ ID NO: 4439 - DNA, 20 bp, Artificial sequence
  Synthetic oligonucleotide
gctagaacctctccattctt

SEQ ID NO: 4440 - DNA, 20 bp, Artificial sequence
  Synthetic oligonucleotide
ctgctagaacctctccattc

SEQ ID NO: 4441 - DNA, 20 bp, Artificial sequence
  Synthetic oligonucleotide
actgctagaacctctccatt

SEQ ID NO: 4442 - DNA, 20 bp, Artificial sequence
  Synthetic oligonucleotide
gactgctagaacctctccat

SEQ ID NO: 4443 - DNA, 20 bp, Artificial sequence
  Synthetic oligonucleotide
tgactgctagaacctctcca

SEQ ID NO: 4444 - DNA, 20 bp, Artificial sequence
  Synthetic oligonucleotide
ctgactgctagaacctctcc

SEQ ID NO: 4445 - DNA, 20 bp, Artificial sequence
  Synthetic oligonucleotide
tctgactgctagaacctctc

SEQ ID NO: 4446 - DNA, 20 bp, Artificial sequence
  Synthetic oligonucleotide
ctctgactgctagaacctct

SEQ ID NO: 4447 - DNA, 20 bp, Artificial sequence
  Synthetic oligonucleotide
cctctgactgctagaacctc

SEQ ID NO: 4448 - DNA, 20 bp, Artificial sequence
  Synthetic oligonucleotide
acctctgactgctagaacct

SEQ ID NO: 4449 - DNA, 20 bp, Artificial sequence
  Synthetic oligonucleotide
gacctctgactgctagaacc

SEQ ID NO: 4450 - DNA, 20 bp, Artificial sequence
  Synthetic oligonucleotide
tgacctctgactgctagaac

SEQ ID NO: 4451 - DNA, 20 bp, Artificial sequence
  Synthetic oligonucleotide
ctgacctctgactgctagaa

SEQ ID NO: 4452 - DNA, 20 bp, Artificial sequence
  Synthetic oligonucleotide
cctgacctctgactgctaga

SEQ ID NO: 4453 - DNA, 20 bp, Artificial sequence
  Synthetic oligonucleotide
acctgacctctgactgctag

SEQ ID NO: 4454 - DNA, 20 bp, Artificial sequence
  Synthetic oligonucleotide
tacctgacctctgactgcta

SEQ ID NO: 4455 - DNA, 20 bp, Artificial sequence
  Synthetic oligonucleotide
gtacctgacctctgactgct

SEQ ID NO: 4456 - DNA, 20 bp, Artificial sequence
  Synthetic oligonucleotide
tgtacctgacctctgactgc

SEQ ID NO: 4457 - DNA, 20 bp, Artificial sequence
  Synthetic oligonucleotide
ttgtacctgacctctgactg

SEQ ID NO: 4458 - DNA, 20 bp, Artificial sequence
  Synthetic oligonucleotide
tttgtacctgacctctgact

SEQ ID NO: 4459 - DNA, 20 bp, Artificial sequence
  Synthetic oligonucleotide
atttgtacctgacctctgac

SEQ ID NO: 4460 - DNA, 20 bp, Artificial sequence
  Synthetic oligonucleotide
catttgtacctgacctctga

SEQ ID NO: 4461 - DNA, 20 bp, Artificial sequence
  Synthetic oligonucleotide
tcatttgtacctgacctctg

SEQ ID NO: 4462 - DNA, 20 bp, Artificial sequence
  Synthetic oligonucleotide
ttcatttgtacctgacctct

SEQ ID NO: 4463 - DNA, 20 bp, Artificial sequence
  Synthetic oligonucleotide
gttcatttgtacctgacctc

SEQ ID NO: 4464 - DNA, 20 bp, Artificial sequence
  Synthetic oligonucleotide
tgttcatttgtacctgacct

SEQ ID NO: 4465 - DNA, 20 bp, Artificial sequence
  Synthetic oligonucleotide
ctgttcatttgtacctgacc

SEQ ID NO: 4466 - DNA, 20 bp, Artificial sequence
  Synthetic oligonucleotide
gctgttcatttgtacctgac

SEQ ID NO: 4467 - DNA, 20 bp, Artificial sequence
  Synthetic oligonucleotide
agctgttcatttgtacctga

SEQ ID NO: 4468 - DNA, 20 bp, Artificial sequence
  Synthetic oligonucleotide
cagctgttcatttgtacctg

SEQ ID NO: 4469 - DNA, 20 bp, Artificial sequence
  Synthetic oligonucleotide
ccagctgttcatttgtacct

SEQ ID NO: 4470 - DNA, 20 bp, Artificial sequence
  Synthetic oligonucleotide
cccagctgttcatttgtacc

SEQ ID NO: 4471 - DNA, 20 bp, Artificial sequence
  Synthetic oligonucleotide
tcccagctgttcatttgtac

SEQ ID NO: 4472 - DNA, 20 bp, Artificial sequence
  Synthetic oligonucleotide
atcccagctgttcatttgta

SEQ ID NO: 4473 - DNA, 20 bp, Artificial sequence
  Synthetic oligonucleotide
gatcccagctgttcatttgt

SEQ ID NO: 4474 - DNA, 20 bp, Artificial sequence
  Synthetic oligonucleotide
agatcccagctgttcatttg

SEQ ID NO: 4475 - DNA, 20 bp, Artificial sequence
  Synthetic oligonucleotide
cagatcccagctgttcattt

SEQ ID NO: 4476 - DNA, 20 bp, Artificial sequence
  Synthetic oligonucleotide
gcagatcccagctgttcatt

SEQ ID NO: 4477 - DNA, 20 bp, Artificial sequence
  Synthetic oligonucleotide
cgcagatcccagctgttcat

SEQ ID NO: 4478 - DNA, 20 bp, Artificial sequence
  Synthetic oligonucleotide
atgcgcagatcccagctgtt

SEQ ID NO: 4479 - DNA, 20 bp, Artificial sequence
  Synthetic oligonucleotide
ttttcactgtctgccatgcg

SEQ ID NO: 4480 - DNA, 20 bp, Artificial sequence
  Synthetic oligonucleotide
tttttcactgtctgccatgc

SEQ ID NO: 4481 - DNA, 20 bp, Artificial sequence
  Synthetic oligonucleotide
ttttgcttgcctgggttttt

SEQ ID NO: 4482 - DNA, 20 bp, Artificial sequence
  Synthetic oligonucleotide
attttgcttgcctgggtttt

SEQ ID NO: 4483 - DNA, 20 bp, Artificial sequence
  Synthetic oligonucleotide
cattttgcttgcctgggttt

SEQ ID NO: 4484 - DNA, 20 bp, Artificial sequence
  Synthetic oligonucleotide
ccattttgcttgcctgggtt

SEQ ID NO: 4485 - DNA, 20 bp, Artificial sequence
  Synthetic oligonucleotide
accattttgcttgcctgggt

SEQ ID NO: 4486 - DNA, 20 bp, Artificial sequence
  Synthetic oligonucleotide
gaccattttgcttgcctggg

SEQ ID NO: 4487 - DNA, 20 bp, Artificial sequence
  Synthetic oligonucleotide
tgaccattttgcttgcctgg

SEQ ID NO: 4488 - DNA, 20 bp, Artificial sequence
  Synthetic oligonucleotide
ctgaccattttgcttgcctg

SEQ ID NO: 4489 - DNA, 20 bp, Artificial sequence
  Synthetic oligonucleotide
tctgaccattttgcttgcct

SEQ ID NO: 4490 - DNA, 20 bp, Artificial sequence
  Synthetic oligonucleotide
ctctgaccattttgcttgcc

SEQ ID NO: 4491 - DNA, 20 bp, Artificial sequence
  Synthetic oligonucleotide
gctctgaccattttgcttgc

SEQ ID NO: 4492 - DNA, 20 bp, Artificial sequence
  Synthetic oligonucleotide
tgctctgaccattttgcttg

SEQ ID NO: 4493 - DNA, 20 bp, Artificial sequence
  Synthetic oligonucleotide
ctgctctgaccattttgctt

SEQ ID NO: 4494 - DNA, 20 bp, Artificial sequence
  Synthetic oligonucleotide
tctgctctgaccattttgct

SEQ ID NO: 4495 - DNA, 20 bp, Artificial sequence
  Synthetic oligonucleotide
ttctgctctgaccattttgc

SEQ ID NO: 4496 - DNA, 20 bp, Artificial sequence
  Synthetic oligonucleotide
tttctgctctgaccattttg

SEQ ID NO: 4497 - DNA, 20 bp, Artificial sequence
  Synthetic oligonucleotide
ctttctgctctgaccatttt

SEQ ID NO: 4498 - DNA, 20 bp, Artificial sequence
  Synthetic oligonucleotide
cctttctgctctgaccattt

SEQ ID NO: 4499 - DNA, 20 bp, Artificial sequence
  Synthetic oligonucleotide
ccctttctgctctgaccatt

SEQ ID NO: 4500 - DNA, 20 bp, Artificial sequence
  Synthetic oligonucleotide
cccctttctgctctgaccat

SEQ ID NO: 4501 - DNA, 20 bp, Artificial sequence
  Synthetic oligonucleotide
catctcaagaacgtggcctt

SEQ ID NO: 4502 - DNA, 20 bp, Artificial sequence
  Synthetic oligonucleotide
acatctcaagaacgtggcct

SEQ ID NO: 4503 - DNA, 20 bp, Artificial sequence
  Synthetic oligonucleotide
cacatctcaagaacgtggcc

SEQ ID NO: 4504 - DNA, 20 bp, Artificial sequence
  Synthetic oligonucleotide
ctccacatctcaagaacgtg

SEQ ID NO: 4505 - DNA, 20 bp, Artificial sequence
  Synthetic oligonucleotide
cctccacatctcaagaacgt

SEQ ID NO: 4506 - DNA, 20 bp, Artificial sequence
  Synthetic oligonucleotide
ccctccacatctcaagaacg

SEQ ID NO: 4507 - DNA, 20 bp, Artificial sequence
  Synthetic oligonucleotide
cccctccacatctcaagaac

SEQ ID NO: 4508 - DNA, 20 bp, Artificial sequence
  Synthetic oligonucleotide
ccccctccacatctcaagaa

SEQ ID NO: 4509 - DNA, 20 bp, Artificial sequence
  Synthetic oligonucleotide
tacttggcgtggcttcctca

SEQ ID NO: 4510 - DNA, 20 bp, Artificial sequence
  Synthetic oligonucleotide
ttacttggcgtggcttcctc

SEQ ID NO: 4511 - DNA, 20 bp, Artificial sequence
  Synthetic oligonucleotide
cttacttggcgtggcttcct

SEQ ID NO: 4512 - DNA, 20 bp, Artificial sequence
  Synthetic oligonucleotide
tccttacttggcgtggcttc

SEQ ID NO: 4513 - DNA, 20 bp, Artificial sequence
  Synthetic oligonucleotide
gtccttacttggcgtggctt

SEQ ID NO: 4514 - DNA, 20 bp, Artificial sequence
  Synthetic oligonucleotide
tgtccttacttggcgtggct

SEQ ID NO: 4515 - DNA, 20 bp, Artificial sequence
  Synthetic oligonucleotide
tctgtccttacttggcgtgg

SEQ ID NO: 4516 - DNA, 20 bp, Artificial sequence
  Synthetic oligonucleotide
atctgtccttacttggcgtg

SEQ ID NO: 4517 - DNA, 20 bp, Artificial sequence
  Synthetic oligonucleotide
catctgtccttacttggcgt

SEQ ID NO: 4518 - DNA, 20 bp, Artificial sequence
  Synthetic oligonucleotide
gcatctgtccttacttggcg

SEQ ID NO: 4519 - DNA, 20 bp, Artificial sequence
  Synthetic oligonucleotide
tgcatctgtccttacttggc

SEQ ID NO: 4520 - DNA, 20 bp, Artificial sequence
  Synthetic oligonucleotide
ctgcatctgtccttacttgg

SEQ ID NO: 4521 - DNA, 20 bp, Artificial sequence
  Synthetic oligonucleotide
gctgcatctgtccttacttg

SEQ ID NO: 4522 - DNA, 20 bp, Artificial sequence
  Synthetic oligonucleotide
agctgcatctgtccttactt

SEQ ID NO: 4523 - DNA, 20 bp, Artificial sequence
  Synthetic oligonucleotide
gagctgcatctgtccttact

SEQ ID NO: 4524 - DNA, 20 bp, Artificial sequence
  Synthetic oligonucleotide
tgagctgcatctgtccttac

SEQ ID NO: 4525 - DNA, 20 bp, Artificial sequence
  Synthetic oligonucleotide
ctgagctgcatctgtcctta

SEQ ID NO: 4526 - DNA, 20 bp, Artificial sequence
  Synthetic oligonucleotide
gctgagctgcatctgtcctt

SEQ ID NO: 4527 - DNA, 20 bp, Artificial sequence
  Synthetic oligonucleotide
tgctgagctgcatctgtcct

SEQ ID NO: 4528 - DNA, 20 bp, Artificial sequence
  Synthetic oligonucleotide
ttgtcagggctcgctaggaa

SEQ ID NO: 4529 - DNA, 20 bp, Artificial sequence
  Synthetic oligonucleotide
actccactgtgccatgactg

SEQ ID NO: 4530 - DNA, 20 bp, Artificial sequence
  Synthetic oligonucleotide
cactccactgtgccatgact

SEQ ID NO: 4531 - DNA, 20 bp, Artificial sequence
  Synthetic oligonucleotide
tcactccactgtgccatgac

SEQ ID NO: 4532 - DNA, 20 bp, Artificial sequence
  Synthetic oligonucleotide
ttcactccactgtgccatga

SEQ ID NO: 4533 - DNA, 20 bp, Artificial sequence
  Synthetic oligonucleotide
cttcactccactgtgccatg

SEQ ID NO: 4534 - DNA, 20 bp, Artificial sequence
  Synthetic oligonucleotide
ccttcactccactgtgccat

SEQ ID NO: 4535 - DNA, 20 bp, Artificial sequence
  Synthetic oligonucleotide
tccttcactccactgtgcca

SEQ ID NO: 4536 - DNA, 20 bp, Artificial sequence
  Synthetic oligonucleotide
ttccttcactccactgtgcc

SEQ ID NO: 4537 - DNA, 20 bp, Artificial sequence
  Synthetic oligonucleotide
cttccttcactccactgtgc

SEQ ID NO: 4538 - DNA, 20 bp, Artificial sequence
  Synthetic oligonucleotide
ctcttccttcactccactgt

SEQ ID NO: 4539 - DNA, 20 bp, Artificial sequence
  Synthetic oligonucleotide
gctcttccttcactccactg

SEQ ID NO: 4540 - DNA, 20 bp, Artificial sequence
  Synthetic oligonucleotide
tgctcttccttcactccact

SEQ ID NO: 4541 - DNA, 20 bp, Artificial sequence
  Synthetic oligonucleotide
ctgctcttccttcactccac

SEQ ID NO: 4542 - DNA, 20 bp, Artificial sequence
  Synthetic oligonucleotide
actgctcttccttcactcca

SEQ ID NO: 4543 - DNA, 20 bp, Artificial sequence
  Synthetic oligonucleotide
aactgctcttccttcactcc

SEQ ID NO: 4544 - DNA, 20 bp, Artificial sequence
  Synthetic oligonucleotide
aaactgctcttccttcactc

SEQ ID NO: 4545 - DNA, 20 bp, Artificial sequence
  Synthetic oligonucleotide
gaaactgctcttccttcact

SEQ ID NO: 4546 - DNA, 20 bp, Artificial sequence
  Synthetic oligonucleotide
tgaaactgctcttccttcac

SEQ ID NO: 4547 - DNA, 20 bp, Artificial sequence
  Synthetic oligonucleotide
ctgaaactgctcttccttca

SEQ ID NO: 4548 - DNA, 20 bp, Artificial sequence
  Synthetic oligonucleotide
cctgaaactgctcttccttc

SEQ ID NO: 4549 - DNA, 20 bp, Artificial sequence
  Synthetic oligonucleotide
gcctgaaactgctcttcctt

SEQ ID NO: 4550 - DNA, 20 bp, Artificial sequence
  Synthetic oligonucleotide
tgcctgaaactgctcttcct

SEQ ID NO: 4551 - DNA, 20 bp, Artificial sequence
  Synthetic oligonucleotide
gtgcctgaaactgctcttcc

SEQ ID NO: 4552 - DNA, 20 bp, Artificial sequence
  Synthetic oligonucleotide
ggtgcctgaaactgctcttc

SEQ ID NO: 4553 - DNA, 20 bp, Artificial sequence
  Synthetic oligonucleotide
gggtgcctgaaactgctctt

SEQ ID NO: 4554 - DNA, 20 bp, Artificial sequence
  Synthetic oligonucleotide
tgggtgcctgaaactgctct

SEQ ID NO: 4555 - DNA, 20 bp, Artificial sequence
  Synthetic oligonucleotide
ttgggtgcctgaaactgctc

SEQ ID NO: 4556 - DNA, 20 bp, Artificial sequence
  Synthetic oligonucleotide
tttgggtgcctgaaactgct

SEQ ID NO: 4557 - DNA, 20 bp, Artificial sequence
  Synthetic oligonucleotide
ttttgggtgcctgaaactgc

SEQ ID NO: 4558 - DNA, 20 bp, Artificial sequence
  Synthetic oligonucleotide
gttttgggtgcctgaaactg

SEQ ID NO: 4559 - DNA, 20 bp, Artificial sequence
  Synthetic oligonucleotide
ggttttgggtgcctgaaact

SEQ ID NO: 4560 - DNA, 20 bp, Artificial sequence
  Synthetic oligonucleotide
aggttttgggtgcctgaaac

SEQ ID NO: 4561 - DNA, 20 bp, Artificial sequence
  Synthetic oligonucleotide
aggtggaaaacaggtcgtgg

SEQ ID NO: 4562 - DNA, 20 bp, Artificial sequence
  Synthetic oligonucleotide
caggtggaaaacaggtcgtg

SEQ ID NO: 4563 - DNA, 20 bp, Artificial sequence
  Synthetic oligonucleotide
tcaggtggaaaacaggtcgt

SEQ ID NO: 4564 - DNA, 20 bp, Artificial sequence
  Synthetic oligonucleotide
ttcaggtggaaaacaggtcg

SEQ ID NO: 4565 - DNA, 20 bp, Artificial sequence
  Synthetic oligonucleotide
cttcaggtggaaaacaggtc

SEQ ID NO: 4566 - DNA, 20 bp, Artificial sequence
  Synthetic oligonucleotide
tcttcaggtggaaaacaggt

SEQ ID NO: 4567 - DNA, 20 bp, Artificial sequence
  Synthetic oligonucleotide
ctcttcaggtggaaaacagg

SEQ ID NO: 4568 - DNA, 20 bp, Artificial sequence
  Synthetic oligonucleotide
gctcttcaggtggaaaacag

SEQ ID NO: 4569 - DNA, 20 bp, Artificial sequence
  Synthetic oligonucleotide
ggctcttcaggtggaaaaca

SEQ ID NO: 4570 - DNA, 20 bp, Artificial sequence
  Synthetic oligonucleotide
tggctcttcaggtggaaaac

SEQ ID NO: 4571 - DNA, 20 bp, Artificial sequence
  Synthetic oligonucleotide
gtggctcttcaggtggaaaa

SEQ ID NO: 4572 - DNA, 20 bp, Artificial sequence
  Synthetic oligonucleotide
ggtggctcttcaggtggaaa

SEQ ID NO: 4573 - DNA, 20 bp, Artificial sequence
  Synthetic oligonucleotide
aatgggtggctcttcaggtg

SEQ ID NO: 4574 - DNA, 20 bp, Artificial sequence
  Synthetic oligonucleotide
gaatgggtggctcttcaggt

SEQ ID NO: 4575 - DNA, 20 bp, Artificial sequence
  Synthetic oligonucleotide
tggaatgggtggctcttcag

SEQ ID NO: 4576 - DNA, 20 bp, Artificial sequence
  Synthetic oligonucleotide
atggaatgggtggctcttca

SEQ ID NO: 4577 - DNA, 20 bp, Artificial sequence
  Synthetic oligonucleotide
gatggaatgggtggctcttc

SEQ ID NO: 4578 - DNA, 20 bp, Artificial sequence
  Synthetic oligonucleotide
ggatggaatgggtggctctt

SEQ ID NO: 4579 - DNA, 20 bp, Artificial sequence
  Synthetic oligonucleotide
tggatggaatgggtggctct

SEQ ID NO: 4580 - DNA, 20 bp, Artificial sequence
  Synthetic oligonucleotide
ttggatggaatgggtggctc

SEQ ID NO: 4581 - DNA, 20 bp, Artificial sequence
  Synthetic oligonucleotide
tttggatggaatgggtggct

SEQ ID NO: 4582 - DNA, 20 bp, Artificial sequence
  Synthetic oligonucleotide
gtttggatggaatgggtggc

SEQ ID NO: 4583 - DNA, 20 bp, Artificial sequence
  Synthetic oligonucleotide
ggtttggatggaatgggtgg

SEQ ID NO: 4584 - DNA, 20 bp, Artificial sequence
  Synthetic oligonucleotide
gggtttggatggaatgggtg

SEQ ID NO: 4585 - DNA, 20 bp, Artificial sequence
  Synthetic oligonucleotide
agggtttggatggaatgggt

SEQ ID NO: 4586 - DNA, 20 bp, Artificial sequence
  Synthetic oligonucleotide
aagggtttggatggaatggg

SEQ ID NO: 4587 - DNA, 20 bp, Artificial sequence
  Synthetic oligonucleotide
caagggtttggatggaatgg

SEQ ID NO: 4588 - DNA, 20 bp, Artificial sequence
  Synthetic oligonucleotide
agacttttgccaagggtttg

SEQ ID NO: 4589 - DNA, 20 bp, Artificial sequence
  Synthetic oligonucleotide
cagacttttgccaagggttt

SEQ ID NO: 4590 - DNA, 20 bp, Artificial sequence
  Synthetic oligonucleotide
gcagacttttgccaagggtt

SEQ ID NO: 4591 - DNA, 20 bp, Artificial sequence
  Synthetic oligonucleotide
gccggttctctctgttagca

SEQ ID NO: 4592 - DNA, 20 bp, Artificial sequence
  Synthetic oligonucleotide
tggccggttctctctgttag

SEQ ID NO: 4593 - DNA, 20 bp, Artificial sequence
  Synthetic oligonucleotide
ctggccggttctctctgtta

SEQ ID NO: 4594 - DNA, 20 bp, Artificial sequence
  Synthetic oligonucleotide
actggccggttctctctgtt

SEQ ID NO: 4595 - DNA, 20 bp, Artificial sequence
  Synthetic oligonucleotide
tactggccggttctctctgt

SEQ ID NO: 4596 - DNA, 20 bp, Artificial sequence
  Synthetic oligonucleotide
atactggccggttctctctg

SEQ ID NO: 4597 - DNA, 20 bp, Artificial sequence
  Synthetic oligonucleotide
catactggccggttctctct

SEQ ID NO: 4598 - DNA, 20 bp, Artificial sequence
  Synthetic oligonucleotide
agcatactggccggttctct

SEQ ID NO: 4599 - DNA, 20 bp, Artificial sequence
  Synthetic oligonucleotide
agacaggcatgatcgcgact

SEQ ID NO: 4600 - DNA, 20 bp, Artificial sequence
  Synthetic oligonucleotide
aagacaggcatgatcgcgac

SEQ ID NO: 4601 - DNA, 20 bp, Artificial sequence
  Synthetic oligonucleotide
aaagacaggcatgatcgcga

SEQ ID NO: 4602 - DNA, 20 bp, Artificial sequence
  Synthetic oligonucleotide
taaagacaggcatgatcgcg

SEQ ID NO: 4603 - DNA, 20 bp, Artificial sequence
  Synthetic oligonucleotide
gtaaagacaggcatgatcgc

SEQ ID NO: 4604 - DNA, 20 bp, Artificial sequence
  Synthetic oligonucleotide
ggtaaagacaggcatgatcg

SEQ ID NO: 4605 - DNA, 20 bp, Artificial sequence
  Synthetic oligonucleotide
gggtaaagacaggcatgatc

SEQ ID NO: 4606 - DNA, 20 bp, Artificial sequence
  Synthetic oligonucleotide
agggtaaagacaggcatgat

SEQ ID NO: 4607 - DNA, 20 bp, Artificial sequence
  Synthetic oligonucleotide
gagggtaaagacaggcatga

SEQ ID NO: 4608 - DNA, 20 bp, Artificial sequence
  Synthetic oligonucleotide
agagggtaaagacaggcatg

SEQ ID NO: 4609 - DNA, 20 bp, Artificial sequence
  Synthetic oligonucleotide
tagagggtaaagacaggcat

SEQ ID NO: 4610 - DNA, 20 bp, Artificial sequence
  Synthetic oligonucleotide
ttagagggtaaagacaggca

SEQ ID NO: 4611 - DNA, 20 bp, Artificial sequence
  Synthetic oligonucleotide
cttagagggtaaagacaggc

SEQ ID NO: 4612 - DNA, 20 bp, Artificial sequence
  Synthetic oligonucleotide
gcttagagggtaaagacagg

SEQ ID NO: 4613 - DNA, 20 bp, Artificial sequence
  Synthetic oligonucleotide
agcttagagggtaaagacag

SEQ ID NO: 4614 - DNA, 20 bp, Artificial sequence
  Synthetic oligonucleotide
cagcttagagggtaaagaca

SEQ ID NO: 4615 - DNA, 20 bp, Artificial sequence
  Synthetic oligonucleotide
tcagcttagagggtaaagac

SEQ ID NO: 4616 - DNA, 20 bp, Artificial sequence
  Synthetic oligonucleotide
ttcagcttagagggtaaaga

SEQ ID NO: 4617 - DNA, 20 bp, Artificial sequence
  Synthetic oligonucleotide
cttcagcttagagggtaaag

SEQ ID NO: 4618 - DNA, 20 bp, Artificial sequence
  Synthetic oligonucleotide
ccgttgatgagcagcttcag

SEQ ID NO: 4619 - DNA, 20 bp, Artificial sequence
  Synthetic oligonucleotide
accgttgatgagcagcttca

SEQ ID NO: 4620 - DNA, 20 bp, Artificial sequence
  Synthetic oligonucleotide
caccgttgatgagcagcttc

SEQ ID NO: 4621 - DNA, 20 bp, Artificial sequence
  Synthetic oligonucleotide
tcaccgttgatgagcagctt

SEQ ID NO: 4622 - DNA, 20 bp, Artificial sequence
  Synthetic oligonucleotide
ctcaccgttgatgagcagct

SEQ ID NO: 4623 - DNA, 20 bp, Artificial sequence
  Synthetic oligonucleotide
tttgccatctcaccgttgat

SEQ ID NO: 4624 - DNA, 20 bp, Artificial sequence
  Synthetic oligonucleotide
ttttgccatctcaccgttga

SEQ ID NO: 4625 - DNA, 20 bp, Artificial sequence
  Synthetic oligonucleotide
tttttgccatctcaccgttg

SEQ ID NO: 4626 - DNA, 20 bp, Artificial sequence
  Synthetic oligonucleotide
ctttttgccatctcaccgtt

SEQ ID NO: 4627 - DNA, 20 bp, Artificial sequence
  Synthetic oligonucleotide
cctttttgccatctcaccgt

SEQ ID NO: 4628 - DNA, 20 bp, Artificial sequence
  Synthetic oligonucleotide
acctttttgccatctcaccg

SEQ ID NO: 4629 - DNA, 20 bp, Artificial sequence
  Synthetic oligonucleotide
cacctttttgccatctcacc

SEQ ID NO: 4630 - DNA, 20 bp, Artificial sequence
  Synthetic oligonucleotide
ccacctttttgccatctcac

SEQ ID NO: 4631 - DNA, 20 bp, Artificial sequence
  Synthetic oligonucleotide
cccacctttttgccatctca

SEQ ID NO: 4632 - DNA, 20 bp, Artificial sequence
  Synthetic oligonucleotide
acccacctttttgccatctc

SEQ ID NO: 4633 - DNA, 20 bp, Artificial sequence
  Synthetic oligonucleotide
gacccacctttttgccatct

SEQ ID NO: 4634 - DNA, 20 bp, Artificial sequence
  Synthetic oligonucleotide
ggacccacctttttgccatc

SEQ ID NO: 4635 - DNA, 20 bp, Artificial sequence
  Synthetic oligonucleotide
tttcccctcttctggaccca

SEQ ID NO: 4636 - DNA, 20 bp, Artificial sequence
  Synthetic oligonucleotide
ttttcccctcttctggaccc

SEQ ID NO: 4637 - DNA, 20 bp, Artificial sequence
  Synthetic oligonucleotide
cttttcccctcttctggacc

SEQ ID NO: 4638 - DNA, 20 bp, Artificial sequence
  Synthetic oligonucleotide
tcttttcccctcttctggac

SEQ ID NO: 4639 - DNA, 20 bp, Artificial sequence
  Synthetic oligonucleotide
ttcttttcccctcttctgga

SEQ ID NO: 4640 - DNA, 20 bp, Artificial sequence
  Synthetic oligonucleotide
cttcttttcccctcttctgg

SEQ ID NO: 4641 - DNA, 20 bp, Artificial sequence
  Synthetic oligonucleotide
ccttcttttcccctcttctg

SEQ ID NO: 4642 - DNA, 20 bp, Artificial sequence
  Synthetic oligonucleotide
cccttcttttcccctcttct

SEQ ID NO: 4643 - DNA, 20 bp, Artificial sequence
  Synthetic oligonucleotide
tcccttcttttcccctcttc

SEQ ID NO: 4644 - DNA, 20 bp, Artificial sequence
  Synthetic oligonucleotide
ctcccttcttttcccctctt

SEQ ID NO: 4645 - DNA, 20 bp, Artificial sequence
  Synthetic oligonucleotide
actcccttcttttcccctct

SEQ ID NO: 4646 - DNA, 20 bp, Artificial sequence
  Synthetic oligonucleotide
gactcccttcttttcccctc

SEQ ID NO: 4647 - DNA, 20 bp, Artificial sequence
  Synthetic oligonucleotide
agactcccttcttttcccct

SEQ ID NO: 4648 - DNA, 20 bp, Artificial sequence
  Synthetic oligonucleotide
cagactcccttcttttcccc

SEQ ID NO: 4649 - DNA, 20 bp, Artificial sequence
  Synthetic oligonucleotide
acagactcccttcttttccc

SEQ ID NO: 4650 - DNA, 20 bp, Artificial sequence
  Synthetic oligonucleotide
cacagactcccttcttttcc

SEQ ID NO: 4651 - DNA, 20 bp, Artificial sequence
  Synthetic oligonucleotide
tcacagactcccttcttttc

SEQ ID NO: 4652 - DNA, 20 bp, Artificial sequence
  Synthetic oligonucleotide
ttcacagactcccttctttt

SEQ ID NO: 4653 - DNA, 20 bp, Artificial sequence
  Synthetic oligonucleotide
tttcacagactcccttcttt

SEQ ID NO: 4654 - DNA, 20 bp, Artificial sequence
  Synthetic oligonucleotide
ttttcacagactcccttctt

SEQ ID NO: 4655 - DNA, 20 bp, Artificial sequence
  Synthetic oligonucleotide
gttttcacagactcccttct

SEQ ID NO: 4656 - DNA, 20 bp, Artificial sequence
  Synthetic oligonucleotide
tgttttcacagactcccttc

SEQ ID NO: 4657 - DNA, 20 bp, Artificial sequence
  Synthetic oligonucleotide
ttgttttcacagactccctt

SEQ ID NO: 4658 - DNA, 20 bp, Artificial sequence
  Synthetic oligonucleotide
tttgttttcacagactccct

SEQ ID NO: 4659 - DNA, 20 bp, Artificial sequence
  Synthetic oligonucleotide
ttttgttttcacagactccc

SEQ ID NO: 4660 - DNA, 20 bp, Artificial sequence
  Synthetic oligonucleotide
attttgttttcacagactcc

SEQ ID NO: 4661 - DNA, 20 bp, Artificial sequence
  Synthetic oligonucleotide
cattttgttttcacagactc

SEQ ID NO: 4662 - DNA, 20 bp, Artificial sequence
  Synthetic oligonucleotide
gcattttgttttcacagact

SEQ ID NO: 4663 - DNA, 20 bp, Artificial sequence
  Synthetic oligonucleotide
agcattttgttttcacagac

SEQ ID NO: 4664 - DNA, 20 bp, Artificial sequence
  Synthetic oligonucleotide
cagcattttgttttcacaga

SEQ ID NO: 4665 - DNA, 20 bp, Artificial sequence
  Synthetic oligonucleotide
tcagcattttgttttcacag

SEQ ID NO: 4666 - DNA, 20 bp, Artificial sequence
  Synthetic oligonucleotide
ttcagcattttgttttcaca

SEQ ID NO: 4667 - DNA, 20 bp, Artificial sequence
  Synthetic oligonucleotide
cttcagcattttgttttcac

SEQ ID NO: 4668 - DNA, 20 bp, Artificial sequence
  Synthetic oligonucleotide
tcttcagcattttgttttca

SEQ ID NO: 4669 - DNA, 20 bp, Artificial sequence
  Synthetic oligonucleotide
ttcttcagcattttgttttc

SEQ ID NO: 4670 - DNA, 20 bp, Artificial sequence
  Synthetic oligonucleotide
attcttcagcattttgtttt

SEQ ID NO: 4671 - DNA, 20 bp, Artificial sequence
  Synthetic oligonucleotide
gattcttcagcattttgttt

SEQ ID NO: 4672 - DNA, 20 bp, Artificial sequence
  Synthetic oligonucleotide
agattcttcagcattttgtt

SEQ ID NO: 4673 - DNA, 20 bp, Artificial sequence
  Synthetic oligonucleotide
cagattcttcagcattttgt

SEQ ID NO: 4674 - DNA, 20 bp, Artificial sequence
  Synthetic oligonucleotide
gcagattcttcagcattttg

SEQ ID NO: 4675 - DNA, 20 bp, Artificial sequence
  Synthetic oligonucleotide
tgcagattcttcagcatttt

SEQ ID NO: 4676 - DNA, 20 bp, Artificial sequence
  Synthetic oligonucleotide
tttgatgcagattcttcagc

SEQ ID NO: 4677 - DNA, 20 bp, Artificial sequence
  Synthetic oligonucleotide
atttgatgcagattcttcag

SEQ ID NO: 4678 - DNA, 20 bp, Artificial sequence
  Synthetic oligonucleotide
tatttgatgcagattcttca

SEQ ID NO: 4679 - DNA, 20 bp, Artificial sequence
  Synthetic oligonucleotide
ttatttgatgcagattcttc

SEQ ID NO: 4680 - DNA, 20 bp, Artificial sequence
  Synthetic oligonucleotide
tttatttgatgcagattctt

SEQ ID NO: 4681 - DNA, 20 bp, Artificial sequence
  Synthetic oligonucleotide
gtttatttgatgcagattct

SEQ ID NO: 4682 - DNA, 20 bp, Artificial sequence
  Synthetic oligonucleotide
ggtttatttgatgcagattc

SEQ ID NO: 4683 - DNA, 20 bp, Artificial sequence
  Synthetic oligonucleotide
gggtttatttgatgcagatt

SEQ ID NO: 4684 - DNA, 20 bp, Artificial sequence
  Synthetic oligonucleotide
agggtttatttgatgcagat

SEQ ID NO: 4685 - DNA, 20 bp, Artificial sequence
  Synthetic oligonucleotide
aagggtttatttgatgcaga

SEQ ID NO: 4686 - DNA, 20 bp, Artificial sequence
  Synthetic oligonucleotide
gaagggtttatttgatgcag

SEQ ID NO: 4687 - DNA, 20 bp, Artificial sequence
  Synthetic oligonucleotide
ggaagggtttatttgatgca

SEQ ID NO: 4688 - DNA, 20 bp, Artificial sequence
  Synthetic oligonucleotide
aggaagggtttatttgatgc

SEQ ID NO: 4689 - DNA, 20 bp, Artificial sequence
  Synthetic oligonucleotide
aaggaagggtttatttgatg

SEQ ID NO: 4690 - DNA, 20 bp, Artificial sequence
  Synthetic oligonucleotide
gaaggaagggtttatttgat

SEQ ID NO: 4691 - DNA, 20 bp, Artificial sequence
  Synthetic oligonucleotide
ggaaggaagggtttatttga

SEQ ID NO: 4692 - DNA, 20 bp, Artificial sequence
  Synthetic oligonucleotide
aggaaggaagggtttatttg

SEQ ID NO: 4693 - DNA, 20 bp, Artificial sequence
  Synthetic oligonucleotide
aaggaaggaagggtttattt

SEQ ID NO: 4694 - DNA, 20 bp, Artificial sequence
  Synthetic oligonucleotide
gaaggaaggaagggtttatt

SEQ ID NO: 4695 - DNA, 20 bp, Artificial sequence
  Synthetic oligonucleotide
ggaaggaaggaagggtttat

SEQ ID NO: 4696 - DNA, 20 bp, Artificial sequence
  Synthetic oligonucleotide
aggaaggaaggaagggttta

SEQ ID NO: 4697 - DNA, 20 bp, Artificial sequence
  Synthetic oligonucleotide
aaggaaggaaggaagggttt

SEQ ID NO: 4698 - DNA, 20 bp, Artificial sequence
  Synthetic oligonucleotide
aaaggaaggaaggaagggtt

SEQ ID NO: 4699 - DNA, 20 bp, Artificial sequence
  Synthetic oligonucleotide
aaaaggaaggaaggaagggt

SEQ ID NO: 4700 - DNA, 20 bp, Artificial sequence
  Synthetic oligonucleotide
aaaaaggaaggaaggaaggg

SEQ ID NO: 4701 - DNA, 20 bp, Artificial sequence
  Synthetic oligonucleotide
gaaaaaggaaggaaggaagg

SEQ ID NO: 4702 - DNA, 20 bp, Artificial sequence
  Synthetic oligonucleotide
ggaaaaaggaaggaaggaag

SEQ ID NO: 4703 - DNA, 20 bp, Artificial sequence
  Synthetic oligonucleotide
aggaaaaaggaaggaaggaa

SEQ ID NO: 4704 - DNA, 20 bp, Artificial sequence
  Synthetic oligonucleotide
aaggaaaaaggaaggaagga

SEQ ID NO: 4705 - DNA, 20 bp, Artificial sequence
  Synthetic oligonucleotide
gaaggaaaaaggaaggaagg

SEQ ID NO: 4706 - DNA, 20 bp, Artificial sequence
  Synthetic oligonucleotide
tgaaggaaaaaggaaggaag

SEQ ID NO: 4707 - DNA, 20 bp, Artificial sequence
  Synthetic oligonucleotide
ttgaaggaaaaaggaaggaa

SEQ ID NO: 4708 - DNA, 20 bp, Artificial sequence
  Synthetic oligonucleotide
tttgaaggaaaaaggaagga

SEQ ID NO: 4709 - DNA, 20 bp, Artificial sequence
  Synthetic oligonucleotide
ttttgaaggaaaaaggaagg

SEQ ID NO: 4710 - DNA, 20 bp, Artificial sequence
  Synthetic oligonucleotide
tttttgaaggaaaaaggaag

1. A single-stranded oligonucleotide of 10-30 linked nucleosides in length, wherein the oligonucleotide comprises a region of at least 10 contiguous nucleobases having at least 80% complementarity to an MLH3 gene.

2. The oligonucleotide of claim 1, wherein the oligonucleotide comprises:
(a) a DNA core sequence comprising linked deoxyribonucleosides;
(b) a 5′ flanking sequence comprising linked nucleosides; and
(c) a 3′ flanking sequence comprising linked nucleosides;
wherein the DNA core comprises a region of at least 10 contiguous nucleobases having at least 80% complementarity to an MLH3 gene and is positioned between the 5′ flanking sequence and the 3′ flanking sequence; wherein the 5′ flanking sequence and the 3′ flanking sequence each comprises at least two linked nucleosides; and wherein at least one nucleoside of each flanking sequence comprises an alternative nucleoside.

3. A single-stranded oligonucleotide of 10-30 linked nucleosides in length for inhibiting expression of a human MLH3 gene in a cell, wherein the oligonucleotide comprises a region of at least 10 contiguous nucleobases having at least 80% complementarity to an MLH3 gene.

4. The oligonucleotide of claim 3, wherein the oligonucleotide comprises:
(a) a DNA core comprising linked deoxyribonucleosides;
(b) a 5′ flanking sequence comprising linked nucleosides; and
(c) a 3′ flanking sequence comprising linked nucleosides;
wherein the DNA core comprises a region of at least 10 contiguous nucleobases having at least 80% complementarity to an MLH3 gene and is positioned between the 5′ flanking sequence and the 3′ flanking sequence; wherein the 5′ flanking sequence and the 3′ flanking sequence each comprises at least two linked nucleosides; and wherein at least one nucleoside of each flanking sequence comprises an alternative nucleoside.

5. The oligonucleotide of any one of claims 1-4, wherein the region of at least 10 nucleobases has at least 90% complementary to an MLH3 gene

6. The oligonucleotide of any one of claims 1-5, wherein the region of at least 10 nucleobases has at least 95% complementary to an MLH3 gene.

7. The oligonucleotide of any one of claims 1-6, wherein the region of at least 10 nucleobases is complementary to an MLH3 gene comprising a sequence of reference mRNA NM_001040108.1 at one or more of positions 221-293, 321-506, 534-576, 584-636, 681-740, 818-878, 952-1024, 1129-1158, 1177-1264, 1287-1318, 1351-1378, 1536-1598, 1623-1660, 1739-1764, 1782-1823, 1847-1908, 2026-2051, 2063-2094, 2115-2146, 2256-2290, 2387-2414, 2421-2592, 2727-2788, 2826-2937, 3005-3043, 3078-3107, 3159-3185, 3214-3239, 3244-3272, 3282-3308, 3426-3483, 3561-3587, 3642-3769, 3804-3839, 3950-3977, 4004-4040, 4052-4115, 4139-4199, 4241-4301, 4328-4365, 4420-4448, 4472-4536, 4669-4708, or 4784-4810 of the MLH3 gene.

8. The oligonucleotide of any one of claims 1-6, wherein the region of at least 10 nucleobases is complementary to an MLH3 gene comprising a sequence of reference mRNA NM_001040108.1 at one or more of positions 221-293, 321-506, 534-576, 584-636, 681-740, 818-878, 952-1024, 1129-1158, 1177-1264, 1287-1318, 1351-1378, 1568-1598, 1623-1660, 1782-1823, 1870-1904, 2063-2094, 2115-2146, 2256-2287, 2387-2414, 2422-2592, 2727-2788, 2826-2937, 3009-3043, 3078-3107, 3159-3185, 3214-3272, 3282-3307, 3426-3483, 3561-3587, 3642-3767, 3804-3839, 3950-3977, 4004-4039, 4052-4115, 4139-4199, 4241-4301, 4329-4365, 4420-4448, 4472-4536, 4680-4708, or 4784-4810 of the MLH3 gene.

9. The oligonucleotide of any one of claims 1-6, wherein the region of at least 10 nucleobases is complementarity to an MLH3 gene comprising a sequence of reference mRNA NM_001040108.1 at one or more of positions 221-293, 321-506, 534-635, 681-740, 842-875, 953-1024, 1129-1158, 1179-1264, 1287-1316, 1351-1378, 1568-1598, 1623-1659, 1782-1823, 1870-1904, 2064-2091, 2115-2146, 2256-2287, 2387-2414, 2422-2592, 2727-2788, 2829-2937, 3010-3043, 3079-3107, 3159-3185, 3246-3271, 3282-3307, 3426-3474, 3561-3587, 3642-3707, 3804-3839, 3950-3977, 4004-4039, 4052-4114, 4139-4164, 4174-4199, 4241-4288, 4329-4365, 4421-4448, 4472-4536, 4680-4708, or 4784-4810 of the MLH3 gene.

10. The oligonucleotide of any one of claims 1-6, wherein the region of at least 10 nucleobases is complementary to an MLH3 gene comprising a sequence of reference mRNA NM_001040108.1 at one or more of positions 331-362, 393-438, 479-505, 534-574, 587-612, 681-740, 847-873, 991-1024, 1210-1262, 1351-1378, 1571-1597, 1623-1648, 1874-1902, 2066-2091, 2256-2281, 2388-2414, 2470-2515, 2732-2788, 2853-2878, 2901-2927, 3282-3307, 3562-3587, 4056-4083, 4241-4266, or 4506-4531 of the MLH3 gene.

11. The oligonucleotide of any one of claims 1-6, wherein the region of at least 10 nucleobases is complementary to an MLH3 gene comprising a sequence of reference mRNA NM_001040108.1 at one or more of positions 335-449, 587-612, 682-736, 848-873, 991-1016, 1179-1204, 1233-1260, 1351-1378, 1626-1651, 1874-1903, 2066-2091, 2115-2146, 2256-2287, 2389-2414, 2471-2499, 2762-2787, 2853-2878, 2911-2936, 3562-3587, 3814-3839, 4006-4031, 4056-4083, or 4244-4269 of the MLH3 gene.

12. The oligonucleotide of any one of claims 1-6, wherein the region of at least 10 nucleobases is complementary to an MLH3 gene comprising a sequence of reference mRNA NM_001040108.1 at one or more of positions 355-393, 952-984, 1177-1205, 2026-2052, 2066-2094, 2470-2498, 3159-3185, 3458-3485, or 4259-4292 of the MLH3 gene.

13. The oligonucleotide of any one of claims 1-6, wherein the oligonucleotide comprises the nucleobase sequence of any one of SEQ ID NOs: 6-4710.

14. The oligonucleotide of any one of claims 1-6, wherein the oligonucleotide comprises the nucleobase sequence of any one of SEQ ID NOs: 89, 92, 102, 107-108, 110-111, 115-116, 150, 154, 160-161, 163-164, 166, 168, 175-176, 178, 180, 182-183, 185-189, 201, 211-212, 229-231, 234-238, 241, 248-250, 254, 265-269, 282-283, 285-288, 294, 296, 319-322, 328-329, 366-368, 377-379, 381-399, 487-488, 511, 514-517, 520, 566-568, 573, 591, 593-594, 599, 602, 666, 669-670, 701-704, 728, 749-753, 755, 757, 784, 786-788, 790, 828-830, 959, 972, 974-977, 1002, 1004-1005, 1007, 1009-1013, 1086, 1110-1111, 1126, 1149, 1172, 1176-1181, 1185, 1260, 1271-1274, 1276-1277, 1297, 1302, 1387-1390, 1392-1393, 1396, 1461-1463, 1473-1474, 1482, 1490-1491, 1495, 1498-1502, 1505, 1508, 1510-1514, 1516-1518, 1525-1526, 1529-1530, 1546-1547, 1572, 1596-1597, 1721-1722, 1724-1727, 1744-1746, 1797, 1800-1802, 1824-1826, 1832, 1835-1836, 1859, 1865-1866, 1870-1873, 1875, 1878, 1880-1882, 1911, 1914-1918, 1924, 1945-1946, 1949, 2000-2001, 2035, 2064, 2066-2067, 2090-2091, 2163, 2166, 2169-2172, 2178, 2181, 2184, 2186, 2194, 2255-2256, 2307, 2321, 2333, 2343, 2345-2346, 2353-2355, 2394-2395, 2403-2404, 2460-2462, 2489-2492, 2495, 2499-2500, 2524-2530, 2561-2562, 2591, 2595, 2616, 2644-2651, 2653-2654, 2661-2664, 2674, 2683-2685, 2687, 2690-2691, 2693-2695, 2725-2728, 2777-2782, 2784-2785, 2789, 2791-2792, 2794-2795, 2797, 2848-2852, or 2917-2918.

15. The oligonucleotide of any one of claims 1-6, wherein the oligonucleotide comprises the nucleobase sequence of any one of SEQ ID NOs: 89, 92, 102, 107-108, 111, 116, 150, 154, 160-161, 163-164, 166, 168, 175-176, 178, 180, 182-183, 185-189, 201, 211-212, 229-231, 234-236, 238, 241, 248-250, 254, 265-269, 282-283, 285-288, 294, 296, 319-320, 322, 328-329, 366-368, 377, 379, 381-399, 487-488, 511, 514-517, 520, 566-568, 573, 591, 593-594, 599, 602, 666, 669-670, 701-704, 728, 750-753, 755, 757, 784, 786-788, 790, 828-830, 972, 974-977, 1002, 1004-1005, 1009-1013, 1110-1111, 1126, 1172, 1176-1181, 1271-1274, 1276-1277, 1297, 1302, 1387, 1390, 1392-1393, 1461-1463, 1474, 1482, 1490-1491, 1498-1502, 1505, 1508, 1510-1512, 1514, 1516-1518, 1525-1526, 1529-1530, 1546-1547, 1572, 1597, 1721-1722, 1724-1727, 1744-1746, 1797, 1800-1801, 1824-1826, 1832, 1835-1836, 1859, 1866, 1870-1873, 1878, 1880-1882, 1915-1917, 1924, 1945-1946, 1949, 2000-2001, 2035, 2064, 2066-2067, 2090, 2163, 2166, 2169-2172, 2178, 2181, 2184, 2186, 2194, 2255-2256, 2307, 2321, 2333, 2343, 2345, 2353, 2394-2395, 2403-2404, 2460-2462, 2489, 2491-2492, 2495, 2499, 2524-2525, 2527-2530, 2561-2562, 2591, 2595, 2616, 2644-2651, 2653-2654, 2661-2664, 2674, 2684, 2693-2695, 2725-2728, 2777-2782, 2784-2785, 2789, 2791-2792, 2794-2795, 2797, 2849-2852, or 2917-2918.

16. The oligonucleotide of any one of claims 1-6, wherein the oligonucleotide comprises the nucleobase sequence of any one of SEQ ID NOs: 89, 102, 111, 116, 150, 154, 160-161, 163-164, 166, 168, 175-176, 178, 180, 183, 185-189, 201, 211-212, 229-231, 235-236, 238, 241, 250, 254, 265-269, 282-283, 286-288, 294, 296, 319, 322, 328, 366-368, 377, 379, 381-399, 511, 514-517, 567-568, 591, 593-594, 599, 602, 666, 669-670, 703, 728, 750-753, 755, 757, 784, 786-788, 828-830, 972, 974-977, 1002, 1004-1005, 1009, 1011-1012, 1110-1111, 1126, 1172, 1176-1181, 1272-1274, 1297, 1302, 1387, 1392-1393, 1461-1463, 1474, 1482, 1498-1500, 1502, 1505, 1508, 1510-1511, 1514, 1516-1518, 1525-1526, 1529-1530, 1546-1547, 1572, 1597, 1721-1722, 1725-1727, 1745-1746, 1800-1801, 1824, 1832, 1835-1836, 1859, 1866, 1870-1872, 1878, 1880-1882, 1916, 1924, 1946, 1949, 2000-2001, 2066, 2090, 2163, 2169-2171, 2178, 2181, 2186, 2255-2256, 2307, 2321, 2333, 2394, 2403-2404, 2460-2462, 2489, 2491-2492, 2495, 2499, 2524-2525, 2527-2530, 2561, 2591, 2616, 2644, 2646, 2649-2651, 2653-2654, 2661-2664, 2684, 2693-2695, 2726-2728, 2777-2780, 2782, 2784-2785, 2791-2792, 2794-2795, 2797, 2849-2850, 2852, or 2917-2918.

17. The oligonucleotide of any one of claims 1-6, the oligonucleotide comprises the nucleobase sequence of any one of SEQ ID NOs: 160-161, 163-164, 166, 211-212, 230-231, 267-268, 282, 294, 322, 366-367, 391-394, 399, 514-515, 594, 602, 728, 750, 752-753, 755, 828, 830, 975-976, 1002, 1176-1179, 1274, 1387, 1462-1463, 1510, 1514, 1529-1530, 1726-1727, 1745-1746, 1824, 1871-1872, 2090, 2256, 2528-2530, 2644, or 2792.

18. The oligonucleotide of any one of claims 1-6, the oligonucleotide comprises the nucleobase sequence of any one of SEQ ID NOs: 164, 186-187, 212, 235, 322, 367-368, 379, 384-385, 388-389, 391-392, 395, 515, 594, 703, 751-753, 828-830, 1005, 1176-1180, 1274, 1297, 1302, 1387, 1393, 1463, 1511, 1514, 1745, 1824, 1881, 2256, 2404, 2491, 2528, 2530, or 2646.

19. The oligonucleotide of any one of claims 1-6, the oligonucleotide comprises the nucleobase sequence of any one of SEQ ID NOs: 174-176, 178, 180-187, 566-569, 573, 701-704, 1260-1261, 1274-1277, 1510-1513, 2000-2001, 2194, 2196, 2661-2664, or 2666.

20. The oligonucleotide of any one of claims 1-6, wherein the nucleobase sequence of the oligonucleotide consists of any one of SEQ ID NOs: 6-4710.

21. The oligonucleotide of any one of claims 1-6, wherein the oligonucleotide consists of the nucleobase sequence of any one of SEQ ID NOs: 89, 92, 102, 107-108, 110-111, 115-116, 150, 154, 160-161, 163-164, 166, 168, 175-176, 178, 180, 182-183, 185-189, 201, 211-212, 229-231, 234-238, 241, 248-250, 254, 265-269, 282-283, 285-288, 294, 296, 319-322, 328-329, 366-367-368, 377-379, 381-399, 487-488, 511, 514-517, 520, 566-568, 573, 591, 593-594, 599, 602, 666, 669-670, 701-704, 728, 749-753, 755, 757, 784, 786-788, 790, 828-830, 959, 972, 974-977, 1002, 1004-1005, 1007, 1009-1013, 1086, 1110-1111, 1126, 1149, 1172, 1176-1181, 1185, 1260, 1271-1274, 1276-1277, 1297, 1302, 1387-1390, 1392-1393, 1396, 1461-1463, 1473-1474, 1482, 1490-1491, 1495, 1498-1502, 1505, 1508, 1510-1514, 1516-1518, 1525-1526, 1529-1530, 1546-1547, 1572, 1596-1597, 1721-1722, 1724-1725-1726-1727, 1744-1746, 1797, 1800-1802, 1824-1826, 1832, 1835-1836, 1859, 1865-1866, 1870-1873, 1875, 1878, 1880-1882, 1911, 1914-1918, 1924, 1945-1946, 1949, 2000-2001, 2035, 2064, 2066-2067, 2090-2091, 2163, 2166, 2169-2172, 2178, 2181, 2184, 2186, 2194, 2255-2256, 2307, 2321, 2333, 2343, 2345-2346, 2353-2355, 2394-2395, 2403-2404, 2460-2462, 2489-2492, 2495, 2499-2500, 2524-2530, 2561-2562, 2591, 2595, 2616, 2644-2651, 2653-2654, 2661-2664, 2674, 2683-2685, 2687, 2690-2691, 2693-2695, 2725-2728, 2777-2782, 2784-2785, 2789, 2791-2792, 2794-2795, 2797, 2848-2852, or 2917-2918.

22. The oligonucleotide of any one of claims 1-6, wherein the oligonucleotide consists of the nucleobase sequence of any one of SEQ ID NOs: 89, 92, 102, 107-108, 111, 116, 150, 154, 160-161, 163-164, 166, 168, 175-176, 178, 180, 182-183, 185-189, 201, 211-212, 229-231, 234-236, 238, 241, 248-250, 254, 265-269, 282-283, 285-288, 294, 296, 319-320, 322, 328-329, 366-368, 377, 379, 381-399, 487-488, 511, 514-517, 520, 566-568, 573, 591, 593-594, 599, 602, 666, 669-670, 701-704, 728, 750-753, 755, 757, 784, 786-788, 790, 828-830, 972, 974-977, 1002, 1004-1005, 1009-1013, 1110-1111, 1126, 1172, 1176-1181, 1271-1274, 1276-1277, 1297, 1302, 1387, 1390, 1392-1393, 1461-1462-1463, 1474, 1482, 1490-1491, 1498-1502, 1505, 1508, 1510-1512, 1514, 1516-1518, 1525-1526, 1529-1530, 1546-1547, 1572, 1597, 1721-1722, 1724-1727, 1744-1746, 1797, 1800-1801, 1824-1826, 1832, 1835-1836, 1859, 1866, 1870-1873, 1878, 1880-1882, 1915-1917, 1924, 1945-1946, 1949, 2000-2001, 2035, 2064, 2066-2067, 2090, 2163, 2166, 2169-2172, 2178, 2181, 2184, 2186, 2194, 2255-2256, 2307, 2321, 2333, 2343, 2345, 2353, 2394-2395, 2403-2404, 2460-2462, 2489, 2491-2492, 2495, 2499, 2524-2525, 2527-2530, 2561-2562, 2591, 2595, 2616, 2644-2651, 2653-2654, 2661-2664, 2674, 2684, 2693-2695, 2725-2728, 2777-2782, 2784-2785, 2789, 2791-2792, 2794-2795, 2797, 2849-2852, or 2917-2918.

23. The oligonucleotide of any one of claims 1-6, wherein the oligonucleotide consists of the nucleobase sequence of any one of SEQ ID NOs: 89, 102, 111, 116, 150, 154, 160-161, 163-164, 166, 168, 175-176, 178, 180, 183, 185-189, 201, 211-212, 229-231, 235-236, 238, 241, 250, 254, 265-269, 282-283, 286-288, 294, 296, 319, 322, 328, 366-368, 377, 379, 381-399, 511, 514-517, 567-568, 591, 593-594, 599, 602, 666, 669-670, 703, 728, 750-753, 755, 757, 784, 786-788, 828-830, 972, 974-977, 1002, 1004-1005, 1009, 1011-1012, 1110-1111, 1126, 1172, 1176-1181, 1272-1274, 1297, 1302, 1387, 1392-1393, 1461-1463, 1474, 1482, 1498-1500, 1502, 1505, 1508, 1510-1511, 1514, 1516-1518, 1525-1526, 1529-1530, 1546-1547, 1572, 1597, 1721-1722, 1725-1727, 1745-1746, 1800-1801, 1824, 1832, 1835-1836, 1859, 1866, 1870-1872, 1878, 1880-1882, 1916, 1924, 1946, 1949, 2000-2001, 2066, 2090, 2163, 2169-2171, 2178, 2181, 2186, 2255-2256, 2307, 2321, 2333, 2394, 2403-2404, 2460-2462, 2489, 2491-2492, 2495, 2499, 2524-2525, 2527-2530, 2561, 2591, 2616, 2644, 2646, 2649-2651, 2653-2654, 2661-2664, 2684, 2693-2695, 2726-2728, 2777-2780, 2782, 2784-2785, 2791-2792, 2794-2795, 2797, 2849-2850, 2852, or 2917-2918.

24. The oligonucleotide of any one of claims 1-6, wherein the oligonucleotide consists of the nucleobase sequence of any one of SEQ ID NOs: 160-161, 163-164, 166, 211-212, 230-231, 267-268, 282, 294, 322, 366-367, 391-394, 399, 514-515, 594, 602, 728, 750, 752-753, 755, 828, 830, 975-976, 1002, 1176-1179, 1274, 1387, 1462-1463, 1510, 1514, 1529-1530, 1726-1727, 1745-1746, 1824, 1871-1872, 2090, 2256, 2528-2530, 2644, or 2792.

25. The oligonucleotide of any one of claims 1-6, wherein the oligonucleotide consists of the nucleobase sequence of any one of SEQ ID NOs: 164, 186-187, 212, 235, 322, 367-368, 379, 384-385, 388-389, 391-392, 395, 515, 594, 703, 751-753, 828-830, 1005, 1176-1180, 1274, 1297, 1302, 1387, 1393, 1463, 1511, 1514, 1745, 1824, 1881, 2256, 2404, 2491, 2528, 2530, or 2646.

26. The oligonucleotide of any one of claims 1-6, wherein the oligonucleotide consists of the nucleobase sequence of any one of SEQ ID NOs: 174-176, 178, 180-187, 566-569, 573, 701-704, 1260-1261, 1274-1277, 1510-1513, 2000-2001, 2194, 2196, 2661-2664, or 2666.

27. The oligonucleotide of any one of claims 1-26, wherein the oligonucleotide exhibits at least 50% mRNA inhibition at a 20 nM oligonucleotide concentration when determined using a cell assay when compared with a control cell.

28. The oligonucleotide of any one of claims 1-26, wherein the oligonucleotide exhibits at least 60% mRNA inhibition at a 20 nM oligonucleotide concentration when determined using a cell assay when compared with a control cell.

29. The oligonucleotide of any one of claims 1-26, wherein the oligonucleotide exhibits at least 70% mRNA inhibition at a 20 nM oligonucleotide concentration when determined using a cell assay when compared with a control cell.

30. The oligonucleotide of any one of claims 1-26, wherein the oligonucleotide exhibits at least 85% mRNA inhibition at a 20 nM oligonucleotide concentration when determined using a cell assay when compared with a control cell.

31. The oligonucleotide of any one of claims 1-26, wherein the oligonucleotide exhibits at least 50% mRNA inhibition at a 2 nM oligonucleotide concentration when determined using a cell assay when compared with a control cell.

32. The oligonucleotide of any one of claims 1-26, wherein the oligonucleotide exhibits at least 60% mRNA inhibition at a 2 nM oligonucleotide concentration when determined using a cell assay when compared with a control cell.

33. The oligonucleotide of any one of claims 1-26, wherein the oligonucleotide exhibits at least 70% mRNA inhibition at a 2 nM oligonucleotide concentration when determined using a cell assay when compared with a control cell.

34. The oligonucleotide of any one of claims 1-26, wherein the oligonucleotide exhibits at least 85% mRNA inhibition at a 2 nM oligonucleotide concentration when determined using a cell assay when compared with a control cell.

35. The oligonucleotide of any one of claims 1-34, wherein the oligonucleotide comprises at least one alternative internucleoside linkage.

36. The oligonucleotide of claim 35, wherein the at least one alternative internucleoside linkage is a phosphorothioate internucleoside linkage.

37. The oligonucleotide of claim 35, wherein the at least one alternative internucleoside linkage is a 2′-alkoxy internucleoside linkage.

38. The oligonucleotide of claim 35, wherein the at least one alternative internucleoside linkage is an alkyl phosphate internucleoside linkage.

39. The oligonucleotide of any one of claims 1-38, wherein the oligonucleotide comprises at least one alternative nucleobase.

40. The oligonucleotide of claim 39, wherein the alternative nucleobase is 5′-methylcytosine, pseudouridine, or 5-methoxyuridine.

41. The oligonucleotide of any one of claims 1-40, wherein the oligonucleotide comprises at least one alternative sugar moiety.

42. The oligonucleotide of claim 41, wherein the alternative sugar moiety is 2′-OMe or a bicyclic nucleic acid.

43. The oligonucleotide of any one of claims 1-42, wherein the oligonucleotide further comprises a ligand conjugated to the 5′ end or the 3′ end of the oligonucleotide through a monovalent or branched bivalent or trivalent linker.

44. The oligonucleotide of any one of claims 1-43, wherein oligonucleotide comprises a region complementary to at least 17 contiguous nucleotides of a MLH3 gene.

45. The oligonucleotide of any one of claims 1-43, wherein oligonucleotide comprises a region complementary to at least 19 contiguous nucleotides of a MLH3 gene.

46. The oligonucleotide of any one of claims 1-43, wherein the oligonucleotide comprises a region complementary to 19 to 23 contiguous nucleotides of a MLH3 gene.

47. The oligonucleotide of any one of claims 1-43, wherein the oligonucleotide comprises a region complementary to 19 contiguous nucleotides of a MLH3 gene.

48. The oligonucleotide of any one of claims 1-43, wherein the oligonucleotide comprises a region complementary to 20 contiguous nucleotides of a MLH3 gene.

49. The oligonucleotide of any one of claims 1-43, wherein the oligonucleotide is from about 15 to 25 nucleosides in length.

50. The oligonucleotide of any one of claims 1-43, wherein the oligonucleotide is 20 nucleosides in length.

51. A pharmaceutical composition comprising one or more of the oligonucleotides of any one of claims 1-50 and a pharmaceutically acceptable carrier or excipient.

52. A composition comprising one or more of the oligonucleotide of any one of claims 1-51 and a lipid nanoparticle, a polyplex nanoparticle, a lipoplex nanoparticle, or a liposome.

53. A method of inhibiting transcription of MLH3 in a cell, the method comprising contacting the cell with one or more of the oligonucleotides of any one of claims 1-50, the pharmaceutical composition of claim 51, or the composition of claim 52 for a time sufficient to obtain degradation of an mRNA transcript of a MLH3 gene, inhibits expression of the MLH3 gene in the cell.

54. A method of treating, preventing, or delaying the progression a trinucleotide repeat expansion disorder in a subject in need thereof, the method comprising administering to the subject one or more of the oligonucleotides of any one of claims 1-50, the pharmaceutical composition of claim 51, or the composition of claim 52.

55. A method of reducing the level and/or activity of MLH3 in a cell of a subject identified as having a trinucleotide repeat expansion disorder, the method comprising contacting the cell with one or more of the oligonucleotides of any one of claims 1-50, the pharmaceutical composition of claim 51, or the composition of claim 52.

56. A method for inhibiting expression of an MLH3 gene in a cell comprising contacting the cell with one or more of the oligonucleotides of any one of claims 1-50, the pharmaceutical composition of claim 51, or the composition of claim 52 and maintaining the cell for a time sufficient to obtain degradation of a mRNA transcript of an MLH3 gene, thereby inhibiting expression of the MLH3 gene in the cell.

57. A method of decreasing trinucleotide repeat expansion in a cell, the method comprising contacting the cell with one or more of the oligonucleotides of any one of claims 1-50, the pharmaceutical composition of claim 51, or the composition of claim 52.

58. The method of claim 56 or 57, wherein the cell is in a subject.

59. The method of any one of claims 54, 55, and 58, wherein the subject is a human.

60. The method of any one of claims 54-58, wherein the cell is a cell of the central nervous system or a muscle cell.

61. The method of any one of claims 54, 55, and 58-60, wherein the subject is identified as having a trinucleotide repeat expansion disorder.

62. The method of any one of claims 54, 55, and 57-61, wherein the trinucleotide repeat expansion disorder is a polyglutamine disease.

63. The method of claim 62, wherein the polyglutamine disease is selected from the group consisting of dentatorubropallidoluysian atrophy, Huntington's disease, spinal and bulbar muscular atrophy, spinocerebellar ataxia type 1, spinocerebellar ataxia type 2, spinocerebellar ataxia type 3, spinocerebellar ataxia type 6, spinocerebellar ataxia type 7, spinocerebellar ataxia type 17, and Huntington's disease-like 2.

64. The method of any one of claims 54-61, wherein the trinucleotide repeat expansion disorder is a non-polyglutamine disease.

65. The method of claim 64, wherein the non-polyglutamine disease is selected from the group consisting of fragile X syndrome, fragile X-associated tremor/ataxia syndrome, fragile XE mental retardation, Friedreich's ataxia, myotonic dystrophy type 1, spinocerebellar ataxia type 8, spinocerebellar ataxia type 12, oculopharyngeal muscular dystrophy, Fragile X-associated premature ovarian failure, FRA2A syndrome, FRA7A syndrome, and early infantile epileptic encephalopathy.

66. One or more oligonucleotides of any one of claims 1-50, the pharmaceutical composition of claim 51, or the composition of claim 52 for use in the prevention or treatment of a trinucleotide repeat expansion disorder.

67. The oligonucleotide, pharmaceutical composition, or composition of claim 65, wherein the trinucleotide repeat expansion disorder is selected from the group consisting of dentatorubropallidoluysian atrophy, Huntington's disease, spinal and bulbar muscular atrophy, spinocerebellar ataxia type 1, spinocerebellar ataxia type 2, spinocerebellar ataxia type 3, spinocerebellar ataxia type 6, spinocerebellar ataxia type 7, spinocerebellar ataxia type 17, Huntington's disease-like 2, fragile X syndrome, fragile X-associated tremor/ataxia syndrome, fragile XE mental retardation, Friedreich's ataxia, myotonic dystrophy type 1, spinocerebellar ataxia type 8, spinocerebellar ataxia type 12, oculopharyngeal muscular dystrophy, Fragile X-associated premature ovarian failure, FRA2A syndrome, FRA7A syndrome, and early infantile epileptic encephalopathy.

68. The oligonucleotide, pharmaceutical composition, or composition of claim 66 or 67, wherein the trinucleotide repeat expansion disorder is Huntington's disease.

69. The oligonucleotide, pharmaceutical composition, or composition of claim 66 or 67, wherein the trinucleotide repeat expansion disorder is Friedreich's ataxia.

70. The oligonucleotide, pharmaceutical composition, or composition claim 66 or 67, wherein the trinucleotide repeat expansion disorder is myotonic dystrophy type 1.

71. The oligonucleotide, pharmaceutical composition, or composition of any of claims 66-70, wherein the oligonucleotide, pharmaceutical composition, or composition is administered intrathecally.

72. The oligonucleotide, pharmaceutical composition, or composition of any of claims 66-70, wherein the oligonucleotide, pharmaceutical composition, or composition is administered intraventricularly.

73. The oligonucleotide, pharmaceutical composition, or composition of any of claims 66-70, wherein the oligonucleotide, pharmaceutical composition, or composition is administered intramuscularly.

74. A method of treating, preventing, or delaying progression a disorder in a subject in need thereof wherein the subject is suffering from trinucleotide repeat expansion disorder, comprising administering to said subject one or more of the oligonucleotides of any one of claims 1-50, the pharmaceutical composition of claim 51, or the composition of claim 52.

75. The method of claim 74, further comprising administering an additional therapeutic agent.

76. The method of claim 75, wherein the additional therapeutic agent is another oligonucleotide that hybridizes to an mRNA encoding the Huntingtin gene.

77. A method of preventing or delaying progression of a trinucleotide repeat expansion disorder in a subject, the method comprising administering to the subject one or more of the oligonucleotides of any one of claims 1-50, the pharmaceutical composition of claim 51, or the composition of claim 52 in an amount effective to delay progression of a trinucleotide repeat expansion disorder of the subject.

78. The method of claim 77, wherein the trinucleotide repeat expansion disorder is selected from the group consisting of dentatorubropallidoluysian atrophy, Huntington's disease, spinal and bulbar muscular atrophy, spinocerebellar ataxia type 1, spinocerebellar ataxia type 2, spinocerebellar ataxia type 3, spinocerebellar ataxia type 6, spinocerebellar ataxia type 7, spinocerebellar ataxia type 17, Huntington's disease-like 2, fragile X syndrome, fragile X-associated tremor/ataxia syndrome, fragile XE mental retardation, Friedreich's ataxia, myotonic dystrophy type 1, spinocerebellar ataxia type 8, spinocerebellar ataxia type 12, oculopharyngeal muscular dystrophy, Fragile X-associated premature ovarian failure, FRA2A syndrome, FRA7A syndrome, and early infantile epileptic encephalopathy.

79. The method of claim 77 or 78, wherein the trinucleotide repeat expansion disorder is Huntington's disease.

80. The method of claim 77 or 78, wherein the trinucleotide repeat expansion disorder is Friedrich's ataxia.

81. The method of claim 77 or 78, wherein the trinucleotide repeat expansion disorder is myotonic Dystrophy type 1.

82. The method of any of claim 77 or 78, further comprising administering an additional therapeutic agent.

83. The method of claim 82, wherein the additional therapeutic agent is an oligonucleotide that hybridizes to an mRNA encoding the Huntingtin gene.

84. The method of any of claims 77-83, wherein progression of the trinucleotide repeat expansion disorder is delayed by at least 120 days, for example, at least 6 months, at least 12 months, at least 2 years, at least 3 years, at least 4 years, at least 5 years, at least 10 years or more, when compared with a predicted progression.

85. One or more oligonucleotides of any one of claims 1-50, the pharmaceutical composition of claim 51, or the composition of claim 52, for use in preventing or delaying the progression of a trinucleotide repeat expansion disorder in a subject.

86. The oligonucleotide, pharmaceutical composition, or composition for the use of claim 85, wherein the trinucleotide repeat expansion disorder is selected from the group consisting of dentatorubropallidoluysian atrophy, Huntington's disease, spinal and bulbar muscular atrophy, spinocerebellar ataxia type 1, spinocerebellar ataxia type 2, spinocerebellar ataxia type 3, spinocerebellar ataxia type 6, spinocerebellar ataxia type 7, spinocerebellar ataxia type 17, Huntington's disease-like 2, fragile X syndrome, fragile X-associated tremor/ataxia syndrome, fragile XE mental retardation, Friedreich's ataxia, myotonic dystrophy type 1, spinocerebellar ataxia type 8, spinocerebellar ataxia type 12, oculopharyngeal muscular dystrophy, Fragile X-associated premature ovarian failure, FRA2A syndrome, FRA7A syndrome, and early infantile epileptic encephalopathy.

87. The oligonucleotide, pharmaceutical composition, or composition of claim 85 or 86, wherein the trinucleotide repeat expansion disorder is Huntington's disease.

88. The oligonucleotide, pharmaceutical composition, or composition of claim 85 or 86, wherein the trinucleotide repeat expansion disorder is Friedrich's ataxia.

89. The oligonucleotide, pharmaceutical composition, or composition of claim 85 or 86, wherein the trinucleotide repeat expansion disorder is myotonic Dystrophy type 1.

90. The oligonucleotide, pharmaceutical composition, or composition for the use of any one of claims 85-89, wherein progression of the trinucleotide repeat expansion disorder is delayed by at least 120 days, for example, at least 6 months, at least 12 months, at least 2 years, at least 3 years, at least 4 years, at least 5 years, at least 10 years or more, when compared with a predicted progression.
